United States Patent Application Publication US 2026/0191916 A1 - sequence listing, part 14

SEQ ID NO: 15 - DNA, 3800051 bp, Blautia massiliensis (residues 1,900,027-3,800,051 of 3,800,051)
  source 1..3800051: mol_type = genomic DNA
ggatagtatcttacaatagctttccccacaagctggtcaaatcgcacgaatttgtttttccatgaacgtgaatccttcgaatcattccggttgtcaccaagcatgaaataactgttttccggaactgtatatggaccataacttccgatcattttctccggaatgaaagagtcatccaatggagtgggtgaaccatcaatgtaaactttcccatccttaatttccactacctctcccggcagtccgatcactcttttgataaaaagacggctttcatcatctgggtatttgaatattacaatatcaaatcgctccgggtccttgaacttttcagaaatttcataaccgaacagattaagattaattccatacgcaagccgaaagccgaaaaggcggtctttcaccataagtgttttttccatggagggtgaagggatttttgcgttaatcaaaacaacattattgataaccagagtaattgccactactattacaatcaatttcacatagcctaacagttcacgccagattttcatgctctccacctcaccgttcttcattattcatatatctgaacaatcttttgtcatattttgcttcccggtaccagccaattccgatcatgaccacgcctaatacaatggtaaccgttctgaccattgtatcagctgaaaacaggcaggaaattacaattccagttcctgcacctgtaaaaaagtcaataacagacttttcccgtttcaatgatccaagcactctttctttatccatggtttttaccattttgacatcttcctttattaagacatcgagagaaatatcaaaacggttgctgatgtctatgagaatctgcagatccggatagctcttttcattttcccaattagacacagtctgtctggtaacatgaaatatttttccaaattcctcctgggtcagtcccttttcttttcgtatttttagtatctgcgttccaatattcatattgctctgctcctgttcttccaatcggttttgctttttcacctggattatataaaaatttctgccaaatgaaaagcaatttaccttttacagcgaaaaaacaggtatgcaaagcttctttgacatgggatttttgaaaacagattcacgtttctctacctaatctgaatccttattttatccccgacagatgtccaaccggattctgcagtgatttcacctgtagctccatcataatatgcgctttcttcggttccgtaatcttcatccgttttatctgctgcgtcggtattttctttctggtctgtatcgtcttgaagccttacttctgtgggagcatctgcccctccgataatttgagtttcaacctgatcctctgcatctgacggatttttttcctccaaagtatcctccggaacttcttctaccgcttctgtagtctcaccaatttctacaaaatcgtcatcaacccagacagtgtctgctgcagccatgtaaggttctctggtataaagctgtaattccagataatcgctgtcaatatccgggagcaaaagaaccgggccgtcagaatccagctgatacataccccagaaactggttttaaaactccattgagatttaccatctgccgaattactgcgcagttcatactgtacctgatttcctttactgtctgtccccataagcatcatctcattaccattatacagcttttcctcaagttcttccggaatttctgccttaattatactttgcagtttattcatggaaaagtctgttaattttacggttccttcttctgttttaacagaaacatcttctagctttttatgaactgtctgtttcataagctcctcatggggaatagaaaaatcaaactcaaactctgcgaaataatcttcgccaagattttcattttgataggcaccgagtaccaaatgtacttctggattttctcccaaatcaccatcaagggaaaaccgggattccagaacagcatcatagacattttcatccagtccagtatttagcaaatcttcgtccgaatatggcagaaggtgtccgctttcgtattcttcaattttctgtccatttattgtagttttctgataatcaatgccaagctgtgtattggcaaaggtccagtcatcctggacatcatccgtgtccttttgcccggaagatgttttttctgcatgcacctttgttaacagaaccccattatccagaacaacttcttttaatgttacagtaattcctttgtcttccttagaggtattcaacacttccgtataagattcaatgccttttgggaaaccaagggtttctcctatggacaatgtaatattttttattgcagcctggatatgtggattagaaaagataacagaacccaatgtgacaatcacacaggcagctgctgctttgctccacccttttggtctccggttttcctttttttcactccattcccgctctgcttcctctatatatttcggatcaatattaccaaattcttttgaaaaatcaaactttttcatatgcgtcctccttctttttccaacagtttcaacagctttttccggtttctgtataaattcattttcacgcttcccgctgacatatgatgccttttggatattgcagaaacaggatctaaaaaccagtatcttcgtacaaaaatatttctgtcctttggagacatttcttccaaaaaacgatttatggtttccatcagttctttttccgccagctgttcttccacggtataagttacatttagctgctccatttcctccataacatctgccatatgaacatccgggcgcttgcctgcaaactttttccttaagcagtcaatactaagatttcttgtaatccgaccgcaaaagtgtgccaatacaggaggatgcgtaggtggaatctgtgaccatactgaaaaccaggtatcattcagacattcctcggcatcttctctattcgccaataaattccaggcaatcttgtagcaatagggatgatacttagtactcaattctataattccattctcatctcttttcaaaaacaggtttataatttcatcatcattcatttacaggttgtcctccgggtttctttaagataaaagtcactgtccataatctgaccagcaacagataaggcgcctttttgaataaaaaaatttccattcatattatatatcgtaaaaaatagtggatggtaacaaaaaaatttaatttttttcagttgagatccaaactacagttttggttttcagaagattaccttttagaggtaaaaataatgaaaagcagccgatattctcattttataaatcatgagataccggctgcaactgctgttataaaatatttagtccaataaaactccctctatttgtattttttagaaaagatttgcacgtctaactcatcactgaaataacgagaatgcgacgcacaattattcaagtcgttgagtcactcttgaaagtaaaaccgtattacacttgtaaaaaaggtctgccgcttctgcactcagattttttagcaagtgtaatattctacatattcctgaactctccttatggagtaacatatcactgatatggacaaacagatacctttcgacgatcaatcagtctattaattgtttttagtagcaacatcaaattgaatcaatttctttatataactttactaagacttcccacaccaataaagtgtgttgaaccttgaaaattcaatatttcagccaataaaaaggcataaatacgttccatttgctataatgaaattgccaaaaaccattttcgcaaaggagatttatgccatgtccattatagcacagaacaacactaacgagatagctctacttgactgtatccagagatttttttcaaaacaccatattggaaaactactggctaaatgcaatggcacgaaagaaaaaggtgtccctgccatttctcttttgaggtataagcttggaaatattttcgtagggcgaagtatgtatatgcagcaacgcagtggatccttcaaggaaggattctctaaaaataccttttaccgtttcctgaattccacaaagacaaactggcttcgtttcacttctcttcttgcggcagatattgtcaacaatgatctgaagaatcttacagatcaaaagcgcaccaatgtctttattgtagatgacagccttttcaaccgatccagctgtaaaaagacagaattgggatcccgtgtttttgatcatacagatatgacctataaaaagggataccgtatgcttacactcagttggagtgacgggaataccctgatcccggttaacagctgtctggtcgcatcttcaaaagagtccaatgtcatcgggcctgttcatacatttgataagcggaccattgccggaaagcgcagaaagctggctcagaccaaagcacctgaagtaatgctcacgcttcttgatactgctacatcttccggattatcagcggactatgtcctgttcgactgctggtttgccaatccggcacagatcacagccattaaatccagaaacatggatgtcattgccatgatcaagaaaagcagccggatcaagtacggatacaagggtgaacagcttaacatcaaggaaatctattccagaaacaagaagcgccgcggcagatcgaaatacctgctttccgttgatatcatgctcgggaaagagaaccctttcccggcaaaaatcgtatgtgtgcgaaacaaggcgaatcgcaaagactggcttgcgttcctctgcacagatccggatctttctgaagaagagatcatccgtatttatggcaagcgctggcagattgaagtattcttcaaaacctgcaaatccatgctgaatctgatcggggaatgccacagcctttcctatgatgcactgactgctcataccgcaattgtttttaccagatatatgttacttgctctggagcaacgtcaaaacgaagaccagagaacgcttggagaactgttcttcttcctggtggatgaaatggcggatattagcttttcaagatctctttgcattctgatggatgctttcatggcaagtcttcaggagatattaaagctcagcgagaatcagctggcagcatttactgctgattttgaagctcgtctgcccgaatatctgaggagcgtgctccatcctgtggctatagtagcataaatcgctattttgttagctgaaatattgaattttcaaggtgcgaagcctatttaaggtatgggaagtcttagtaactttattaattgcttaagcaaattttcatattcttttattgtctcatccgagtcagactcttttactatatccttgtcatttcgtagattagaaatttcaaatgggtattggttcaataatttgattgtttctttgcaatttgggattaattgatttcttttattatatggaatcacatttatgcgctctcttaaattatgccgcagattgtatgcaagccagtctgccgtatcaaaaaaagcacgatactcatgtccatatgctttctcaaggtttcctttgatataagaatagtaatcgtatccttccggcacttttttggttgtgcttgcaaaaatccttacaacatgatcatatgcatcccggtgctcttttaatggctgaatcaatgcatccccattttctgatatttcttcggctgtaagtagataaattttggttttttgatgtaattgatatatctttttccacaacagtccaatctcatcgttttgcattagattaaaaacattttgttcagccatttaaaataccccgctattgaattaatgaatttttaactttgactccttttccctcattaccagaaacgatttttcatctagaatacggtcaccaaaaatccgccaggatccacgtcgctttattcggtacgctttaatagtggagatttgtccgttttcacagtctcttgaaaaaaatttcctatatttaaaagtttctattatcccccatagagttcctgcaactataaaaaaggaagtactgctacagcttcaatcataaatattctccttatcatcccagttgcatgcatcgtcacaatcggactgcatcccaaggtcttttggttcgatcacatttcttacactactacctgcactatatttttctcttctgtaaattatgctaagatgaacaaatgtttctctgtaaagtaacaaaagaataaatccaacaaatatacaggatagtaatataactcctttcctagatgccacagactgcaattgtggatttccaaggaagcaaactgctgaaattgcgcttcctgatttgcctttccatttaagaacaatgagtcgaaagcatccaaaaccgtaagatctttcagatttccacccacatactccttaaactcttcctccaataatccgaaagtttctatacaaacaaatagagttttatcataaaagtcccaaataccattgtcaacggatttttcgtatatttatatttttaccgtctcataaccaactctctcacttcgaacatgtagcaaaaaatctatcataccagataaggaatgtcaaaactgtccagattttacggctgttatctgcctttttctctttgtgctctttcagaagtaaaagaagcttatctgtatgaaaaaactcttctgcttctttcgaggtaaataactcctttaccctctgataccagtcatcctgccgcagccacacacggattggaattggaaaaccaagtttcctacgttcatcggtttcctgtggaagaaattctgaaacagctttacggaaaatatatttggttgtacccgctgcaatcttggcttctttcggaagctttgctgcaaagtcaaaaacttctttatccagaaatggtaccctgacttccaatgaatgtgccatgctcattttatctgctttctgtaaaatatcgccaggaagccagtatctcagatctacagactgcattttttccatgtctcgaagtgatcctctgttttctgactcaagttctttaaaaaatggtcttaaatattcctgtgtggaaggtcctgttactttatttttcaaaatctgcgctttctctttttcacggtaaatatatgcatttccgatgaaacgttcttccactttcattcctgcacggataaggaaatctcgtcccttcacatccggcagctttgcagccagttttccaattacacgtctgacaccaaatggaatccaggcaatttttttcaatgattccggttctctgtaaatattatatccaccgaaaagctcgtctgctccttctccggaaagaacaaccttgacatgacctgcagcctcttttgagagaaagtagagtgcaacggcagaagcatcagcaaggggctcatccatatgatacataacatctggaagggcatcccagaattcctgcttggatatgattttcacatggtgttttaaaccagctttttctgccactttggcagctttgtttacttcactatatcggtctccctcatcgaatcccactgtaaatgcctgatctgcaccagaggaagaagccagataaccggaatccactcccccggataaaaacgcgccgacttccacatcacttaacatatggtgctccactgaatcctttaaattctctgcaagctgattccgcagctgctccatattcgtcttacggtcccattggcctggtgcaagctttgttttgaaataagtctttatctcatagtttccgtttttatataaaagcatatgacctggcataagcttataaatccccctgaaaaaagtttcttccagaggggaatattgaaatgacaaatactgctccagtgccttctgatttactttcctttcatagcctggaaatgcaaggatactcttaatttcagaagcaaatacaaagtgtccatctatttcggcatagtacacaggcttaattccaaaaaaatcccttgcaagcatcaaactctgctcctgttcattccatacagcaaacccaaacattcccctgagcttatccagtgccttctccccatactgctgaatagtatttatcagaacctccgtgtcagaatgagtacagaaagaaatgccgaaagcctcaagttctgcccgcagttccttataattatagatttctccattaaaaacaatatgaaggtttccgtccgcactttccataggctgctgcccatcttctaaatcaataatactaagtcttcgaaagcccagcgtgatcttctccctgcaaaaagagccctcactatccgggcccctatgctcaatagctttcatcatcctttcaattactgtcttctgatcctgtctgtaacctgtaaatccacagattccgcacattttatcctccgtatctatttgatgtagtttatacgctgcagcaacttttttatcacaagtgaatcccacatggtcacatcgtaatcatagtggtctgtgagtctgcgcctcagcttgtgttctcccttctttttctacctttgtagaaatcatctctaattctacatctgtagaattagaaagtcaatcccattttctacaattgcagaatctatgtcatatatttgattacccgtcatgacataccccaatgactcagatcttacagatttacaaacggtatgaatgcctcactgctgacaaaatgaaaagccggaaaaacggtcttttgttacagagccatttttccgactgtacggttatctatatttaatgaatctttaccctttcactgcacctgccattacaccgccgataatatgcttctgcatcacaagtatgtgcagatacgcacatgcatgcgctttcatctcggtaattgaattgccgaggattctcacttattgttctaagcaactatacataaccgcccctcatcagtttttatacataaaaagcggtgggaaataattttcctgccgctttaaatctcagattaatcatatttcgctacatttcgtaaaattctcctgcattctgccgggattctcccgagtccatcaggtcctacattcagcaaataattaattcccagatgatttaatttttgttttatatctgcgatctctcttgcagatttccaattttgatcccatgcacaatatccccaactgttattcacagttgccgcagtctcatacaggccataaggtgatggcttgaatccgtcaaatgcattcatcatgctttctttcagttccgcattatctggtatagattccggtacttcattgtctcccagtgatacataatcatatgctccattgccaagccttgaattgatcagacaatctggctgatatttttttaccaaatcaaaaatcgcccgactatgcttctcttccaatgttatcggaacatcaaaccaaatcaggctcaattccccataatttctcagaagttcttcgatttgaggataaatcttattgcgaaagcacacatcataatcttttttatcattatccggaaaatcccagtcattgcaccaggctgttccctcacacggaatgtgtccggataaatatcctccaccattcttatcatgccagtccagatcctgggaataatataatccaaactttaacccgtttttgtagcaggcttctgcaagttctcctaaaacatcgcgtttgaacggtgtcgcatccaccacattgaatttatccaccttagaatggtacatggcaaagccttcatggtgtttgcttgtaaacaccagatatttcattccgcaatcttttgcaaattttacaatttcatccgcattaaaatagacaggattgaatgccgttgccagtttatcatattcgcttatcggaattctgcatcttgtctgaatccattcagcgtaatttccacatttctggtctttccactctccggccagaagtgaatacaagccccaatgaatcatcattccatatccggcttctttaaaccattttctcgtatctgtgctcatactgatcgatctcccttcatttgtgttttcattatatcagaaagttcacgattccaacattccataacttttacattatattagatatttttactttcagagatgctatttgcaagattgccataatctgccaaaaatttacgcgttctattcgtcaccgcagataacagtgagaacacaacgcgtagttttcagctgaaaatatcagttcctgatcaatatactcccacgaaagacattaccggtgctactctggagtcttcgatcacgattgccagaaaatctgtctggattcctttaagatcaataatctttttatatccaatggtagttccattatagcattctttcatagatccattttcttcatagcagactttgaacttttctactctctggctgaatggaatggcctccttcagtaccagataattaagtttctttttctcgatccagttaatcttgatcatgagcttatttgttcccgcttcgttcataaaataagtctcataatcatcatttcttaatactgtaggttctttctcccagcaatccaatggcgggatagatgtgatacctgcttcatcaaccagattatatttaaaggtattctcaataaactcgcccaactgtttcagatttgcagcatctgtttcatggatacggccatttttcatcggaggaagatttaataataatgtggtatttccccctacggattttaagtaaatgtctttcaggttctcaaaggagcggacctggtcatcttcttcctcatgatagaaccagcctggacggatagaaacatccgtctctgcagggtaccatgcaagctctttttcatttgcaaggcgttccctgcttccaaggtctgtctgggtctcgtccaacggccggttccggaattcttcattatcttcctgctggcttaacgctgctgtgatcgccggatcagtcatatcctttgcaacaacgctccattcactcggtcttacttccccggcctcgtttccacaccatctgatgtccgggcctgaaatagagatcaccgcattcggctgcagttcacgcatcactttataatatctctgccagtcgtatttctgaacctttccatttggtccctcaccacatgcaccgtccagccagattacaaagatatcaccatattctgtcagcagctctgtcagctggttcagatagtaatcgtcatactcttttccctttccatagctgctgttgtttctgtcccagggtgaaagataaacaccaaatttaagtccaaactcccggcacgcttcggctgtttctctgacaatatccccttttccgtttttgtacggggagtttttgatactatgctcggtgtatttggatggccacaggcaaaatctgtcatgatgtttgcatgtgaggatcaggcccttcatcccgccctctgctgctgtttttgcccactggcgtgcgtccagctctgtcggattaaaaatggattccggttctgttccatctccccattcgcttccggtaaaagtatttacagtgaaatgaatgaaacagaaaaattccatgttttcatatgcgatctgtcttgctgatggtaccgctttaactaatcttttatcttctttcaaaccattatagttcatatcgaattcccctttttatttttatcgtttcctctcttcagaaaaacggtaattccattttaaccttttaatcttctgcttttcagttcttcatttgctttttctacattcatttttgtcatgatgaacgtgataattaaagcaaggattacagggaaccacagatacatgaaatgtaatatattcaggcaggatgcagactgggtaacaacttcaccattgaatccacttgcagctaaaagccatcctgtcagtgcagtaccaattccaccaccaagcttggttccgaaagatgtacaggaatacatggttccatcaattcttttgccttttgtaaggtaagtatattcagaacagtttgccacaactgctcccatatctccctgccatggtccctgtccgaatgaggatacagcagtaaagagaatcataagaggtacactgtgcatataagctgcaacaacaacaagtgctcttccgacagttgcaattgcataacctacaatattcagtttgtaaagtcctttccattttgctaccagggtaggtgttatgatcagtgcaatgatcagtggaatattgatcgcccaggaaaatacagcataaagatcttcattaagaaggacatatgtcatatagtagatacccatgttcagcatggcagagtatgtctgctgtacaatatatgttacggaaatcataatgtaatatttgttagaaaacagaagttttgctgcctctacaagaccatatttctctatctcgtcatcaacaaccccatcaccattcagttcctcttccggaagctcttttacagagaaaacagagatggtatttacaatgacacctacaatcgcaaacacgattgcaactactttccaggcgtatgccccgcctccaaggatctgtacaaacttaactgtcactgactgaataataaggacagttgaaaaggcaaagatgaatctccaggatcccatctcaactcgttccttactgttcttggttactaatgctacaagtgccgcataagcaatattgtttgcagtaaagaatacggcatttaaaagggtgtatgcaataaagaaccatgcatactgtgcaaattttcccatgttagtcggaatagcaaagtttgctatcagagttaccgcacagccaatgtatgcgtaaagcatccagggtcttgcttttccaagacggctctttgttttatcgatcatagctccaaaaaagatatccgttacaccgtcaaacagtttggatactgcaataagtgttccgacgatacctgcattcagaccaactatattggtcagatagatcatgataaaggatgacagaaatgaatataccacatttccagccatgtctcctgaaccatatccaactttgttataccatttatttatccgctccttttttggcaagatttgtctgttttttctttctatttggcatgaattcccggttaacctgctttataatacagccataagataaagaaaggaggaacagacaatgaaaagatttaaagcttatatcgaatatgtaatgaatttttatgccaactattacagattttaccggtaagtgcaaaatatggcttccggatataacccggaatctgtatttgcagttcatgtagaccttgtaatcaataatttcagtatacgctagaatccgtttcctgtacatgaacaggatgcgttaatatataaacaaaattttatagttggcagacttagccaaaaagagccgatatcagtcttgcaaagaccttgtatcggttctttttgtattttctcattatctaattatgggaggatttttctgtatcaccgaaaaaacttttatccccgcacttcaagccattggtcaatgttcccaaaatgtaccgcctgcaggttatctacatcaaccagttgcgggaagctgtttctgatgatcaggacaccgttttccttatcctgtttttctccaccgccagcgatgcctcccatggtcctatcaagtgttaaaaccgttccatctttataacgcacctggtcaatactagttctggcataaagatccatgccatagtccgtacctgcgtactcaaatttgtttttttcatcttcatacaccttcatagcttcatcataatcaagatataatgaccataaaaggggcgttacttccatttttttcactgtgatttcataacctccaaaatcacatttccggttcacttccagagttgtcggaggctttactgcacccagagtccatttaaaatcccatgttccatctgtaataacagtcgtatcataatctccttcctccgtaagattctttaatgtgatttctactgttttattactcagatcataatcaccgtcataagatatacaggcgttaaaatatttaagatgtgtagaattttgatctgttttcagtaacacatcctgtcctaccccagtattgaaacttccaaatctgttatcgtccactgcatatacttcttttccatcgatcttaaaatgtgtcatctcctcaaaagaagtatgatcagtcatagaaatactgtcatctgttttcacttcaaaaaaagcatacaggaatccctgatcctgaatagaatctgtcagggtaaccgtcacaccattttgtgttacagactggtctatattctgaatataagttgattcctgcagtgtctcctgctgttcctccgatggatccagtcttttcaccaggtaatcattccatttaaagaactcttttgcagccacagtaacagccataccagtacagattactgctgctgcaatcagtaatcgtccactgattttttttcttttgtattttttatcaactgaatccgcctgttcaatctgttttagtgtatcttcaaatttattatgaaaatcctgtggtacttccggtgcgatattattccatttcttctctaacatgacattttcccctttcctgttattctctttaattgcttgctgtttttcccagttgccggtcttttctcttcttcggataactgcaccttcaaaaactctcttgcacgtgaaagtctgcttttgatcgttccttccggaatatccagagcctcactgatctctttcaatgaaaatccttctaaataatacaatgttaccaaaaccctcagatcctccggaagttccataatcgccatatacagatgactgtatctgtcctcctcagtcattttcatattgtccatatattcttcatatggaataacattttttcttttccgaagaatccctttgcattcattgatcaatatccttgtgatccatgttcggaaatatttttctttctttaaagtgggaagtttttcatatgccttaagaattgtttcctgcacagcatccccacaatcagagtcattcttcagaatggacttcgatatatgatacagcatggcttctgcatcccggacctccttaataaatacatcttttgtcataactttgtcttctccttttgtccagctggattactactcatgtttacttttacactaattagatgcatcgaaaaggaaatcggttctcataaaagtatttttttccgttgcctcttccattgccaacgaaatatccacttttttaatctctgttctgtttgtgtttgtattttttatgtaattccgtaatatattcctcaagcttctctttgtcttgctcttcacaggcgacaaaaacaaaacactgcttagatcaatccgatatgctttccctgttttctcacccagtttctctgtatatgtgcaatgaaagatgagatactttatccccattccagacaggtacgcagagcatgactctcacaaagcagtgtccattcagatagttggaaccgttgtgtgcggctcagtatagataatatcagcagaaataaggtatctgctgtcggaacagaaaaagtttcaaaatagatcaaaaaatattgctgaagtctgcctatcagtattttttcgctgtataatgtttttgccgtacagggtcactttcctttgtaatgttttatgccaaattcattatacatcaggaaatcctgtacgatatttttttataaaaaagttgtaaaatagtgtatcaatatcataattttctaaaattgaaactttttgctctttgacaggatatataagaatgtaaaggttaaaagcttttaatttttgaaaatattaaaaagaaagtaggattgatatgacagatgaagcagaacttttgcagcgtctcgggaacagagaaaaaaattcaatagatgaagcaatccgaatttatacgccgtatttgagtactgttttgtatcatatggccggcaattcactgccgaaagaggatattgaagaaattgtggcagatgtgtttgttgtactttggaagaataccgggaggatagatttgcagaaaggtacattacggtcatatcttgctgctgttgcccggaattttgctctgaaacggataaacagaaagatggatcatacatctcttgaagatattgaactgtcagatggcaaaaatttcatggaagagaattttcacaataattatgtatgggaaacagttatgagccttggcgaacctgacagcgagatttttgtaaggcggtataaatttgatgaaaaaatcaaggatatttcaaaagcaatgggacttaatatttctacagttaagaccagactttcaagaggaaaaagaaaactcagaaaaatgttatcggatgcggaggaaaaattatgagaagaaaaaatttgcttaaagaattgggaatacaaaaacaggcagatatttcctgcaatgctcttgatattgatacagagaatgtcagacagagagtttatgcaaaacttgacttcgcagatacagaaaggaagcaaacgactatgagatcaaaaaagaaaatattacctttgttgatagctgcaacacttacaattggagttactgctatggcagcaacaggaaagatttcaatgtggacaggttcatctgcatcacgtgctgattatacatctcttccaacgtcagaacagattacaaaggatattgggtatagaccggtattgattgatacctttgagaacgggtactgcttcaaagagggcaatattataaaaaacagttttaaggatggcaatgcaaatgtaattgagaattttaaatctgtgtcctttgattatcagaagaatggagatgttgtattgtttgaacagcagaaatttaactcaaaacttactccgtcaggtgatattattgccactgtaaatggaacaaatttgtattatgtacattatataaataaagtggtatcagatgattacgaattgacagaacaagataaaaaagaccagtccagtggaaaagttgtattcagttacgatgacagtgcttctcagattgaagtcagtcaggttcaaagcgttaactggaataaggatggcatccagtatgatttgctgcaaatagatggaaaattatctgccggagaacttgcagatatggcgagagaggttattaataacagaagataaagaaaaaagatggtggattcagtccggttcaccatctttttgtaactgttgtggaaatacctgtatcgcagctgatgcataatatgttataatttacagatagtgtagctgtccagaacttttatagttaaaataaaagtacagcctttcgattcattcaattagctgtactctcatttcctagattgacatgatccagcaaagggattgcgtaattgatatcgttacgctgcccttcacggatcataaaataaaccggataaccgtatgcatctacaactgcatggatttttgtgctggctccaccacggctgtgtccgatttcgtttggaggccccctttttttgctccagcattatgctgatgagctttgacgatagaaacgtccattgacagttctgttaattcggcttctaagctcaaaacacgaaaaatattatcaagggtgccgtcttcaatccatttacggaaacgggaataaaccgtttgccaggagccataacgttctggaaggtctcgccatggagctccgctacgagcaatccaaacaattccattcagaattgtccggctgcatttttgtgggcatccctgttttccagaattttcaggcggcagtaatgaagctatacggatccattcttcatcggttaattcgtatcgtctcaacataatttttcaattctatcataaaaggattttgggttcaagatggggtaatgagaaattttctatccggatgtcctgtttattctttatgatcattccaatacatgcgacagtgcagtgcccttcccggaaataaaaaaacggcttatatcttcatgctccagttcaaaattggtgtccagggctatcctttcgcctgatagttttcatacggttcagaaaagaagctgttctttcagtttccattttctgttcctggaagtaaaggctgcctccacagaattcagaagcagcagccttttctgctcctgggtaagatctaacagagattccatatatcggaattcccgggaaagggttgttctttcaatcgccggatcatcggtatttaaggttaccttaagtcccatttcgagaaatgctttcagaggataagcagacatttcttccatagcttttgtctgacggttgcttgtagggcacatttccagaaaaacccccttatcctttacaagctgtatcacttccttatttcccgcgatcctcacaccatgaccgatcctgactgcccccatatggacagctgtttttacatcctctgcatttccggcctcgcctgcatggatggtaaatggaacctgatattctcttgcttttgcaaaaagtgcctcgtaattttctgttggaaagagtgcctcggctcctgcaagatcgatagcaaccacgcctccatcttcaacaagatatttttttgccagctccagagtttccagattttctttctggttaagatcaccgcgcatacagcataagatcagattaccggggatgggagctcttttcagaccacgtaatgcagcatggatcgctgtttcctgagtcatttccttctgtgtatggagctgtggggcaaaacgaagttctgcgtagatcacaccgtcttctttcatttcagaaaggataagataaacagcctcttccaatgcctcttctgtctgaagaagggaaagaggcaggtcaaagcatttcagaaaatcattgagattttcgcaggtatccggcacagaaaggagagaaagaagctcttcatctgtggcagccggaagcgtgatctgctgcaatgcggcaagttttctggctatctctgtggtaatgcagccgtccagatgtgcgtggagatcgatgtagtgatcaattctattttctgttttcataggcgctaagtacctccctggttggatttattcttatccctgaaatggttttgcgtttcttatggtatctgtcggaaggaaatattaatgtgaattccgggttatatttcctgtgtggctttttttaaccaggattgctcttcttcattcagatacggagaaatcttttcgtatacaagggcatgatactgattgagcaatttgcgctctcctgcttccatctgttccggatcgataccttccagatcaaatgggaccagagtcagtggctcaaatttcataaactggccgtaggatgttttttcggcttttttgcaaactacaagattttcgtgacggatgccgaattcattttccgcataatatcccggttcatcggaggtgatcatcccttcttccagaacaggagccggaagcgcggcagggcttttccagcggaagctctgcggtccttcgtgtacattgagaagataacctacgccatgaccggttccgtggttgtaatcctctcccatagcccagagcggtcctctagccagggcatccagattcaggccggtacagccgtaacggaattttgctgctgccaggttcaggtgtccacggagtactgctgtgaaatattttttttctttttcagtaaccgggccaagtacaacggtgcgggtgatatcagtagtgccctccagataatgtccgcctgtatccatcagaaccagcccttttggctccagtggaatattggtttcttctgttgcactgtaatggacaatggctccatgtgcaccgtaggcaatgatgggatcaaagctgtttccctgaaaattctcctgtccggaacggaattcatagagcttatcagcagcggaaagctcggtgatcttctgttttcccacatttttcttcagccagtggataaacttcaccattgcaacgccatctttgaggtgggcagtcttttcattctggacttcggtttcatttttgatggcttttgggagaagggtcaaattttcaccgtccaggatcgttaccgtctttggaatactgctgaccagccggctgtttacattgcttctggaaagaaatacctttttctcttcgggaatcgtctgtacataggtgtaaatatcatcatatggataaatggcaataccgtctttggaaagtgcttccttaacagaatccgaaaaggctttttcattgacaaaaagacgaagctcactgtcatccagcataagataggaaagaactaccgggcagcagtggatatcatttccgcggatatttaaaagccatgcaatgtcatcaagggaagtgaggataaagaggtctgcgcccttctctttcagtttgctgcggatctcacggatcttgtctgctctggatcttccggcccatttttcggataattccattaccggttcacaggaaagtgccggacggtcattccagatatttccgatgagatcctcatttacagaaaaatgtacctgttttttctgaaggattttttctagcgtctctgcttcttctgcgcttacggtacggccatcgaagccgagacacattccctctttcagattttcttccaggaatttgtggatcgttggtacgcccggttctcccatcttaaacagagtaaccggagttccctctaactgctgtgcagcctggataaaatatcttccgtctgtccagagtccggccatgtcctgcatgatcacggcagttccggcagaaccggtaaatccggtgatgtattttctgcatttaaaataatccccaacatactcagaaccatgaaaatcatcggtcggaaccagataagcatcgattcccttttccttcatttgttttcgaagagctgtgatccgttctgtaactgtcataatcttatgcctcctctgtataactgttctttatcgcaaagccatgatccatagggccgcttccctttcccagatccagcatggcagcaagggctccggaaatatagtccttggcacggtttacagattccaccatggaaaatccctttgcaaggttggaagtgatggccgaggaaagagtacatcctgttccgtgggtattgggattgtcgatcctttttccctcaaaccactgatatgttccattcacatagagaagatcattggcatcattgagcttatgtccgcccttgcagagaactgcacagtgatactgctcggaaacctgttttgcagcttcgatcatatcatcggcgcttttgatcttccgtccggtaagcacctcggtttccgggatattcggggtgagaagatctgcaagaggaaacagttcttccttcagaacatccaccgcctcctcactgatcagtcttgcaccgcttgtggcaaccataaccgggtccaccacgatattttttgcccgatactgttggagctttcctgcgatcatatggatcagatcactttcggaaaccattccgatctttactgcatccggaaagatatccgtaaaaatacagtccagctcctgacccaggaactctgcggttgcattctggatggatgtgacaccggtggtgttctgggcagtcagcgcggtgatggcactcatggcgtatactccgtttgccatcatggttttaatatcggcctggatcccggctcctccgctggaatcgctgcctgcgatggttaatgctgttttcatctttggtttcctccgttttctgtgaatatatggttctgtaactctgtcagatcccgacagtagatataggcatcctttttcagctgttcctgatccggttctcctaatgcgtcataaataccggcagtcagaaatcctgcatttccggcagtctgcaacgcgtagagtgaatcctccacaaccagcgtctgggatggccccgttcccagtgcttctgcagctgtaagatagaccttcggagaatgtttgctttctccgatctcactggtggtatagattttatcaaaaaaggaaagaagtccgtttctttccagcgcccggcagatatgttccctggggcttgaggttgccaccgcagccgggattttctgttctgcaaagcattgaagaagttctctggcacctgattttgccgggacctcttcaaaatagtatttacggatccgggatttcagatccatcacgatcttttcttcggaatacgcaagagtaaacctgtttttcagccagtccgctccctgctccatactcatgggaaaaaggatttcgtccatttccgcaaccggctgatatcccagatctgtaatatatcgttttccaagctccttccaaacagagagcgaatccagaaggacgccgtctgcatcaaatatcacggcttttataggaaaaatcatgtttatactcctgaaaattttttttgtgatactctgtcattggaacattacgaaataattttccatgacataaaaaactgatataaaaaacgcggatatatcacaaaagatatatccgcatttattataagccgcagatatccaaaatgcaaccgggagttaaggaggctcatctgaaacagcagctctattttcaaaacattttttattctttaccgttaaaacaatatgtgcatacattacaaggatcgatcccaatggattccagaagatcatccagtctgtgatagcgaagggtggtaaaattctgcatctcgcagatatcctgtaccatctgctcatatttctctgtatgtggatctgcatattcatccagaacttcttgtggacagttggggccttctctcttctcgatcacctgacgagtgatcagctccatctcagatttggaacgtgagaagtttaaatatttgcagccgtacatgattggcgggcaggcaggacggacatgaacctctttggctccgctgcggtacagaaattcggttgtctcgcgaagctgggtgccacgtacgatggaatcgtctatgagaagaagttttttatccttgatcagcgcacgtaccgggatcagtttcattttggcaataaggttacgctggttctgattggtcggcataaaagatctgggccaggttggtgtatatttaatgaatggtcttgcgtaaggaatgccggattcattggcgtatccgatggcatgggcaatgccggaatccggaacaccggctacaatatccgggtgcacggaatcgccgtctctctttgcaagcatgcttccacagcggtagcgcatctcctctacatttacaccttcataagaggctgtcggatatccgtagtaaacccagaggaaggaacagatcttcattttctttccgggctcaaccagagttttgacttcgtctgctgttacgaatacgatctctccggggccaagttctttataatcttcgtatccaaggttgatataggcatgactttcaaaggaaatacagtatgacccttctttgcggccaatttccacaggagttctgcccatcttgtcacgggctgcataaattccgtcttttgtcataagaagcagagtcatggagccgtcgatcagtccctgtacgtactggataccttccacaaagttgtccttttcacagatcagtgcagcgatcagttcggtcacattgactgttccattggtcatctcctgaaaatgtaccttggtcgtatcatacagctgctgcagaagttcatcgtaattattgatctttcccacaaaagtgagggcaaagctgccgatcctggaactgaacagaaggggctgaggctcataatcagaaatacatccgattcccatatttcccttcatggaacccacatctccgtcaaattttgtacggaaaggcgtgttctcaatgttgtggatggcacggtcaaatccatgttctccgtaaacagccatacctccgcggcgtgttcccagatgagaatggtaatccactccgtaaaaaagctccagtacacagtcatccttcgatgctactccaaaaaatccgctcataatgcgctcctctctactactatgatgttaacgatttctgttatcgttcctatatccataatcgctatcagtatagcataagagaattgaaaataaaaaccaatttggcggataatcttgctttttcagaataaactataaagatattagccggatttatagaagtggaaaattttttctgtatgagacaaaagaaacagctccgcttttacagaactgtttcttttggccatttggcaaatatgtggtttaaaaatccggtttattcctgggtgattcccttaaactcgtaaccggcttccttgatcacttcttcaacctttgcctcgtcaaccttctcaggtacagagaatacagttgttccgttctcgtgggaagaaactacgtcttctgctccgaaagctgcctggatggctttgtttacgtgtgcctcacagtgtccgcacatcattccttctacattgaccgttacctttaccattgttttgttctccttttcttcttttatattttcatcatgactgatgtgtaatgttaccggatttttgatttctttgtcttttgctgcattgtggatctgaaacagattcagacgcagcgcatttgttacaacacagaagctggaaagactcatggccgcagctccgaacatcggattcaaggtccatccgaaaagcgggatccagacacctgctgcaaggggaatgccgattatattgtagaaaaatgcccagaaaagattctcatggatattccgaagtgtggcgcggcttaaacgtactgccgctggaacatcgcttaactggctcttcatcagaacgatatctgccgcatcaatggcaatatctgttcctgcaccgatggcaattccgatatcggctcttgtaagtgccggcgcgtcgttgataccgtcaccgaccatggcaacctttccctgctccttcagagcgcggatcacactttcttttccatccggaagaactcctgcgatcacatcgtcaactcctgcctgagctccgatggcttttgcggtacgctcattgtcaccggtaagcataactacacggattcccatgttctgaagctcttttactgcacggggactgtcttccttgatcacatccgcaactgcgatgattcccagaagtttaccgtttcgtgtgaaaagaaggggcgtttttccatgctctgcaagctgctcggctctcctgttaaggtctgcggaaacctttgtctggctgctgataaatttcatgtttccgcctgtcagtttgtcacttccaagtatagcggaaagtccgtttcccggaagtgcctggaatccggttacttcacctgtggcaaggttttcttcctcggcttttttgagaacggcttttgccaaaggatgttcactttttttctccagtgcacaggccagagtgagaagctctgtttctgtaactccctctgccgggagaatatctgttacctccggctgaccgcttgtaatggttccggttttatccaaagcgacgatcaggacttttcctgcttcctccagggaaacagctgttttgaaaaggattccgtttttggcacccataccgttgccgaccataatggcaaccggtgttgcaaggccaagtgcgcaggggcagctgatgaccagaacggaaatcccccttgccagagcataaccgaaggtctgtcctgcaagaagccagatgatcgttgtgatcactgcgattgtgatcactgccggtacaaacacaccggaaacacggtctgcgatctttgcgatcggtgccttggtggctgccgcatcactgaccattttgatgatctgggaaagggtggtatcctctcccactctggtcgcttcgcatttgataaatccggactggttcacagttgccgcagaaaccatatctccggtttctttatcaaccgggatactctcgccggtcagtgcggattcattgactgcggtggttccttccaggatcactccgtccaccggaatattctctcccgggcggacgacaaaggtttctcctttctgaacctgctcaataggaacggtaagttcctgtccctttcgtaccacgaccgcagttttgggtgccagcttcataaggcttttaagcgcatccgttgtctttcctttagaacgggcctccagcatttttcctacggtgatcagtgtcaggatcatggctgcagattcaaaataaaaatccatcatgtaattcataactgcagcagaatctccatctacctgtgctcttgtcatggcaaacagtgcatagacgctccataggaaggatgccatggagccaagagctaccagagtatccatatttggggaacggcgccacagactcttaaatccattgatgaaaaatttctggttgatcaccatgatgataccagccaggagcagctgtaccagtcccatggctacgtgattgccgtcaaaccatttcggcagtggccatccccacatcatgtgccccatggagaaatacatcagtaccagcaaaaatcccacggatgtgataagacgtttctttaggatcggagtttcatgatcttccagcgcttcttctgccgcagacatggaaatcttcgctccggcagctccgccctttaaggatgcaccatatccggcggcttccactgcggcaatgatctcaccggatgaagcggttccttcaactcccatggagttggtcagaagactgacggaacagctattcacccccggaactttcgatacggctttttctacacgggcagagcaggcggcgcagctcataccagttacattatattgttccattttctttcagtacctcctaaaatccagtttgtccctttatttcatcagcttctggagggttgctaccagctcatcaatggtctcatccttaccttcccggatatcccgggcaacgcaggtgcggatgtggctggcaagcagctctttgttgaacgcattcactgcagcattggctgcagcggactgaatcaggatatcattacagtaggcatcattctccatcattcctataatgcctctgatctggccttcaatacgtttcagacggttgatcagcttttttttctcctcctctgagcgtgcagtgtgtttttcacagcagcagggacagactttcttttcagacataggctgtctctcctttctcataaatacccccatggggtatcctctatatatggaataatatataccctcatggggtatttgtcaatagaaacagtatttttataataaaaaagcccgctcatccgataatggcaatgagcgggcaatataaacttataattagccgaatcaggtaagtccccaacggggttacgaaaaacaataagcagtgggtgaggacttgtctataattctactcttccacgatatgtccgaaataatagaatcccttgcaggtatccaggcttacttttacatatttgccgatgagatctttttctcccgggaaatgaaccagaagattatgctgggtacggccagtaagagtacccttctcacggttttcatcttctaccaggatttcctgaatggttccctggaaacgggaggaattttcccggcccttttcctgtaccagggtaagaagacggctgaaacggtcttttaccacatcctccggcacctgattttccatgccggctgcaggggttccgcttcgtttggaataaataaatgtgaaggcagtatcgtaatttgcttttcttacaacatccagtgtttcctggaaatcttcttctgtttctcccggaaatccgaccatgatatctgttgtcagcgaaatatccgggatcgccttacggatcttatctaccagctccagatatttttccttgtcgtagcggcggttcatttcttttaagactctgctgcttccggactgcagcggaagatgcagatggtgacagattttctggctctccgccatggtctggatcagttcgtcggaaagatccttcggatgggaggtcataaaacggatacgtttcagcccttcgatcttttccacttctttcagaagttctgcaaaggttaccggtgtttccaaagtttttccgtaggagtttacattctgaccaagaagcatgatctcagtaacgccatctgcgaccagttcctcgatctcgcggatgatggcctgtggctcgcggctcttttcgcggccgcggacataaggaacgatgcagtagctgcagaagttattgcagccaaacattacgctgactcctgttttgaaggagtatttgcgagaagttggcatgccctctacgatctcatcggattccttccagatatcaatgatctggtcgtcggtctgcagcgtccggtaaaaaagctcggggaatttgtggatattatgggttccgaatacaagatttacatatttataatccttgcggatcttttccactacgtgatgctcctgcatcatacatccgaacagtacgatcttcatatccgggtgctcccgtttgatgctctttaaatgtccaagatgtccatagatcttctgattggcattttcccggactgtgcaggtgttaaatacaactgcatcagcatcctcggtatctaccatttcatatcccattttttccatgatggccgcaatagactctgtctggatggagttcatctggcatccttcgttctggatgtggaaggtgggatgtttcgtactgcttttggcaagaagctctttacatttttcaatgtactgaagctggatttctgtttctttgttctggctcaaatcaattcctccaataactaaaaatttcatatgtatctataaattatttttctttagacaatatcagacgggagcattgaactcccgtctgatatatcatacagaatttatagttgtctgtcaaagagtttttataatagcggtgcaaaaactctcagtacgttctgaatggcacgtaccacaatatttctcttctggcagaatgccagatcaatgggatcacagtactccagggtttctgtaaaatcatcccggatgtccagaatcacatcattcttatacatccagacaccatcttcaaaatgcagataaaggcttcggtaatccagatttatggttcctacgacgcctactttgtcatcacagacaaaagatttggcatgcaaaaatcccggctggtattcgtagatctttacacctgcttccagaagctgcttataataagactgtgtcagcaggaagaccatttttttgtccgggataccgggtgtcatgatccggacatccacaccgctttttgcagcgaggcacagggcggtcatcatctcattatctatgatcagatatggtgtgcagatataaacatagtttttggcgcgattgataatattaagataaacgttctctcctacgatctcatcgtccaggggggaatcgcagaatggctggacataaccgcttcccggaaaatcgtttgggtgccacctgtgcggaacataatttccgaaatcaagagaagtatctgttctggtaacgattccccacatatacaggaacatagctgtcatattccagacgccttctcctttcagcataacggctgtatccttccagtggccaaaccgttttcgctgattgatatattcgtcagccaggttgatgccgccggtaaaaccggtccagccatcgatcacacagatcttacggtggtcacggttattctggattatattaagaatcggacggaaccggttgaatacttcgcatttgattcctcgccggcgcatctcctgatcatacttgtatggcaatgtggtaaggcagccgaagccatcatagatcagtcggacatccactccttctttagcctttttttcaaggatattaaggatcgtctgccacattaccccgtcatttatgatgaaatattcgataaaaataaaatgctttgcctgctccagttcatgcaccagaaccggaaacatatcatctcctacctgaaaatactctgctgtggtattctcgtgaaccggatatcttgaatactgccagatgtaatccgactggatcctcatggaacggtcgtcttcgtttaaacgttttcttgtgagctctgagccttccaggtattcagcagtttcatcaataagattctgataatgctgctccattacagcgccgatccgtgacttaccgaaaagaaggtacagggaaacaccaaataccggaaaaataaggatcagcatcgtccaggcgagcttataagatggattgatctttttatttacgatccacagaacaaccagaaaacctatggcctgcattccgatcgtcacccatctggagtattccataagccggaaaagggcgatcagcagccatgccagctgcacaacaagagccagagctacataaaaaattcgattaaataataatttaaggagcgatcgcaatggtttgataatcagtttaatacacaaattcatatttctttccttcgtcaaacgttcctgtttctatttaattaaaaatccctgaccatatagccagggatttttgcgcacaattaattatatttacgttttcttgcggcttcagattttttcttacgacgaacgcttggcttctcgtaatgctctctcttacggatttcctgctggattcccgctttagcacagcttctcttgaatctgcgaagagcgctatctaaagtctcgttctcttttacgataacgtttgacatagactcacacctaacctccctccagttgtagattgtgctaaaatacaactgtctgggtatttttcttgcacgagtgttattatatagcataacatgtggtttcgtcaacatctttttcgatttttatgaaaaaaatgtcaaaattgtagatcacgcacaattttgttattttgtgagctgtttttcaaggattcctgctgctgcgtccatagcttcctgtgccttctccggattctttccgccggcctgtgccatgttcggacgtccgccgccgccaccgccaacgatggctgctacagccttgatcagatttcctgcatgggcgcctgctttctgagctgcgtcagtcgccattgcaaggagatttaccttgccgccgtttattgctgcaagaaggacaactccttcgccaagctgctctttcagtttgtcaccaaggtctctcaggccattcatgtcaacgccctcaactttggctgcaagaagttttacgccgtttacttcaacaactttatccatgacatcgccaagtgcactctgggcagctttgctcttgagagattcattttcgctctgaagagcctttacctcagcctgcaggtgactgattttttctacaacctcggctgtattggcctttaatgcttttgcagcctcatggagaagctcttcctgctttctgtagtattcgataactgctttgccggtaagtgcctcaatacggcgtacaccagctgcgataccggattcggacacgatcttaaagagcatgatggagcttgtattctttacatgagtaccaccacagagctctttggaaaagtctcccatggatactacacgtaccttctggtcatatttctcaccaaagagagccattgctccggatttcttggcttcttccacatccatgacatctgtatgaacatcaagacctgcctggatctctttgtttacaagctcttctgttgcctggagttcttctgctgtcatagcctgaaaatgagcaaagtcaaaacgaagtctgtccggagttaccagagaacccttctgctctacgtgggaaccaagaacggttttcagtgctttctgaagaagatgtgttgcactgtggtttttctcggtatcttttcttgcttcttcgtttaccttcagggatactgtctcacctgaggaaatcataccggattccatatgtcctacgtggccgaatttaccgccgcggagtttgatggtgtcctcaacaacaaatttaccgtttgcagtctcgattacaccggtatcaccttcctgtccacccattgttgcatagaaaggagtctgctctacaaatacggtacccttctgtccctctgtgagagaatctacgatctctgtttctgtggtaaggacagtaaccttggaatcaaaggtaagatgatcgtagccgacgaattctgttgttacgtttacatcaatatcatcgtatacggttgcgtctgcacccatatagttggttacttcacgggcagtacgtgccttgactctctgttcctccattgctttctggaagccttcctcgtcaatgccgtagcctttttcctcaaggatctcttttgtaaggtcaagagggaatccgtacgtatcataaagcttgaatgcgttgtcaccggaaagagtcttttcacctgcttttttcatatcctcttccatgtcggaaaggatacgaagtccctgatcgatagttttgttgaactgattctcctcatttgtcagtacacggaagatgaactctttcttctcctcaagctccggatatccggctttggagctctcgatcacctgtgcacttaattttgcaaggaaagttccctcgatgccaagaagacgtccgtgacgtgctgcacggcggatcagacggcggagaacatatccacgtccctcattggttggcatgattccatcggagatcataaatgttgcggaacggatatggtcagtgatcagacggatggaaacgtcatctgcatagtttttctcatattctttatgtgcgatctcgcatacaagattacgaagtgcacaaattgtatctacatcaaaaatagaatcaacatcctgaacaactacagcaagacgctcaagtcccataccggtatcgatgtttttctgtttcagggttgtgtagtttccgtttccatcgttctcgaactgtgtgaaaacgttgttccatacttccatgtaacggtcgcagtcgcagcctaccgtacatccgggtttaccacagccgtatttttcgccacggtcatagtagatctcagagcatggaccgcatggacctgcgccatgctcccagaagttatcctcttttccgaaacggaaaatacgttcagacggaatccctacttctttgttccagatattgaaggcttcatcatcatccaggtaaatggatgggtagagacggtctgcatcaagccctacaacctcagtaagaaactcccaggaccagtggatggcttctttcttgaagtaatcaccaaaagagaaattaccaagcatttcaaagaaagtaccgtgacgtgcggttttacctacattttcgatatctccggtacggatacatttctggcaggttgtcactcttgttcttggcggcttctcagcacctgtaaaatatggtttcagcggagccatacctgcattgatcagcagaagactcttatctccctgaggaaccagggaaaagcttttcattacaagatggcccttgctctccataaagtcaaggaacatcttacgaagttcgttcactccgtactttttcatgttgttatcctccttgtgtcaaccctacctgtcagcatttccggaatgccgtagctttatcccggaaatgtcacagatatgggaaattattttacacagatctttttgaattttttcttgcctcgtttcagaacgatcccgtcccctgcaaaagcatccttctcaaccgtatggtaaatatcggtgagcttctcaccatcgatggatacaccaccctgctggatcgcacggcgaccctcggaacggcttggtaccagctctgcttttacaagaagtgtgatcaggtcgatttttccttcctcgtcaaaatcttcctctgaaagctctgttgtaggcatatgggaagtatctgcacctgagaacagtgcgcgggcaccctcctgtgctttcttggcttcctcctcaccgtgtacaagctctgtcagctggtatgcaaggatctccttggctttgttcagctcgctgccttcccatttggccatctcgtcgatctcctcaagaggaaggaaagtaagaagacgcatacatttgataacgtcagcatcgtctacatttctccagtactggtagaaatcgaacggggatgtcttattcggatcaagccatacagctccagactgtgtttttcccatctttttgccctcagaattgagaagcagtgtgatggtcatggcataggcatccttgccaagcttacggcggatcagctcggtaccgccaagcatgttgctccactggtcatcgccaccgaactgcatgttgcagccgtatttctggtacagcatgtagaagtcgtagctctgcatgatcatgtagttaaattccaggaagcttaagcctcgctccatacgctgtttgtagcactctgctgtcagcatacggtttacggaaaagtgagcacctacctcacggagaagctctacatagttaaggttcataagccagtcagcattgtttaccataagagcttttccatcagagaaatcgatgaaacggctcatctgctgcttgaagcagtcaatattgtgctggatggtttcttttgtcagcatctgacgcatatcggtccttccggacgggtcaccgatcattcctgttccgccaccgagaagggcaatcggacggtttcctgccatctgcagtctcttcatcaggcaaagagccatgaagtgacctacatgaaggctgtctgctgtagggtcaaagccaatatagaatgtggcttttccgttatttaccatctctttgatctcgtcttcgtctgtaacctgtgcgatcaggccacgtgctttcagttcttcccaaactgtcattgttctttcctcctgtatagcttttatgtttacgcttttattaaagtttataatttacagtatcagcgtaaaaaataaaaatgcccggttcctgtccgtttaggacgagaaccgggtcccgcgttaccacctaaatttacagaaaactcgcatttcctgcctcataaagtgaatctacatcccgttatatccatatatatcaagatataaaaccacttcagcacaataacgggtgccattccgtcgcagcctatctataatacgctattattataaagtttataatttacagtatcaagttccgattcggtgcgcagctccgggatgtattcacaaaagttctaccctgcgcctctcacctgccggctgctctctgtggggttttcctcaagctactttttcccttccaagccttttactatactatatgaagtatacaaactgcttttttgtttgtcaagaaattttaatattgctttgacaacttaaagtggcagaatgttactgtttactctgttctcagtaacacgcttcgcgatgcacagaatttacgctgatcgcataaattcgcgcggtatgtttcgggttttctgtgagtgataagtggaacttttatttctgtaagccatttattccttcatctacgtaaaggttattgccgtctgccgctgatgtggcaagctgatcacaccgttcatttaacggattatctgcatgtcccttaacccagtggaagcttacctgatgctgctccttggcctttaaaaggcgtttccagagatctacgttcttcacatcttcgttttttccacgtttccagtttttcttcagccaggaatcgatccagtgctgattaaaagcatctaccagatatttggaatcggaatacagatccacctggcaggggcggttcagtgtttccagtgctacgatggctgccatcagttccatccggttgtttgtggtttttttgtagcctctggacagttcacgttcatgtagctggcctttggtatcgatgtactgaagaactgctccgtagcctcccggtccatccggatttccccgggctgcaccatccgtatagatttttacctgcatatttgcttctccttaaattttcaattttatgtccatacgcctgtttgttcaaagtttactgccggagactatgttgcttatacccagtctacaaaaaatgtatggcctttataagtttcatatttcactttgctgaaattcagattctggttccagaaatagctggtcatcatgaaatacatataattaaaatctttctgtttaaatcctctgagtgttctggctttgccggaagtgacatgtttattgaaaatagtcattgcttctcttgcagcctgataagcaagagtacggttttcaaactgaccattgagacgtttgagaagagccccgttccgcactacagaatactgtggggttgtgctgcttccgatattctcatagatcacacctcgtatcgtagatggaaattccttgtctgatttgatcgtacgattcagaacacaaagtgctactgcttccattccgatcttgccctgatcgcctgcttctgattcgcaaagcgcggccagcagtgcttcatcggatgtcttgccgttggctattccaggatggctcttatattcttttaccatagtgtaatatctgctgtttttggtatcgtaaactttgacatctccattgctgacatttagatttggtttggtagtcttcgcagtggccactccgtctgctgcgatggagtatgtaattccattcactgtcacggaggtacttactgccatgacaccgttggatttaaaataatagttcttctgatcgatcgtcttcagaccagtatacatataaccagtactggtggcaaaatagtagctgatatttttggatttgttttttacccatttggttgccatataaccggaagttttgtaaaaataacgtttctgccctttgctgttggtgagccagccggttgccataatgcctccgccttttgtgaaataacgtttccttcccttgctgcagtttacccagcctgtggtaagcttacctgttttggggttgaaatagcgcttatggcctttggaatctgtcatccagccggttgccataacacccttgccttttgtaaaatagtaggtatatttgccattgaccttcatccagccctttacctgtactccggtctttgtgttaaagtagtacttgtatccgcccagggtcagccagcctttctgcttgctcccatcattttttatgtagtatgtttttccagcgatagttttaaagcctgcagtggcagcctgtacctcttttgcagaagcagaaaagactgtgcttcccgcgatcagcagcatggcaagcatcagacccttcagccatttttttgttctgaaactcttcataattttccccatttcctgttttagatataaaagctagtttgtctcaaaaattacaaaaatgttacatttcgtttattatatcgtaatgaataaacactgtcaacttttttgtaactgtggacggactcctgccatatgatgaagtgtaaataaaatttgctggaggacttatcgatgagtgacttagcggctaccaattgtggatgtgattgcggatgtggttgtgattccggatgtagcacaggatgtggatgtaacaataactgtggctgtaataatggctgcggaaattccctgtttggaaacggtggaaacagctgctcctgtatcctttggatcatctgtctgatgtgttgctgtggaaacaacagtggctgtggctgtaataacaacggctgcaacgacagctgttggatcatcatccttcttctgcttttgtgcggaaatggatgcggctgcaacaattgctgctgatcttttgaaaaggcagaggtcatttcctctgccttttctgctgccgtttttctgcttcctcctgtttcttttttttctcttccagacatttcagatctatctcataaaaagaatttccatcaatgacaagtttctgttttttttcagattccataaccacattcctttgaaaaattacttctatatataatatgaccagggaaggtttctgtcatatttctttctgcaaattcatagatttcaggaaaaaggacttttttatggaacaggagcctatcgcacgtactgctctggatgaaatggtggaaagtgaccagaatcagatgctgaaggctatgatcccgtaccttccttcttccgggcagcagtttttatctgtgtatacgaaagtccaggaactatggaataccatgtcactttttcaaagcagccgtaaaacagccgatctgcaggctaccggtttttccggaaccgatcctctggaaatgctgcaggatatccgtaagtgctgtggcggagaaaatcgccgtcagatcgatcatatcaccagtcttatggctacgatccagatgcttcggatcatgaatgaagattcgtcaggaggtgagaatccatgagtgatgactggaaaaataatccccggctttccggaatggaccctcagaagctttccatgcttcagggactggcagaccagggattggggaaaaatccgtccgaacttctgccatttatcatgggcgcagcttctaaaggaaaaaatgcgggcttaaatttcagctctgatgagatctccactatcatagaagttctgaaaatggggaaaagtccggcagaggcagctaagcttgacagaattgtgaatctgatgaaaatgatacgtcattaacagctttgtgatcccggaacagcggttttctgttccgggattttctactttgtaattctttttatatttgtcggaatataatctgcaaaaatctgacatatccatagattctatcgcataattcatagaacatattccctatttttgtgatatttttttatcattttccctttcttcttatatcagtatatggtatacttgtccatgaaatgaatgatatgcaaaataggattttatgcgtcaagtgtttggcgaatggggagttgtcgccagaacgaaaagtacgtcttacggtatgagatccgcacccgttgcagcaatataagagaatatctcatattgtgtagggctttttcgacatacgttctattacaattggagatatctttttttatgcgcaaaaataaaagagacagtctccgaaaaacgtgatttttttaacaaatggaggttgttatttatggtagacaaagcaaaagttgaagaggcgatcaagcttcttctcgagggaatcggcgaggatgtaaacagagagggactgcagggaactccggaacgtatcgcccgcatgtgcgaggaaatttatggcggacttgataatgaagcggatgaacatcttcagaaacagtttcatgtagagaacaatgaaatggttctggaaaaggatattaccttttattccatgtgtgaacatcatcttatgcctttttacggtaaagctcatatcgcatatatcccaaatggcaaggttaccggcttaagcaagctggcccgtaccgttgatgtgtatgcaagaagaccgcagatccaggaacgtctgactgtgcagatcgcagatgcgctggaacgtgttctcgctccaaagggaatcatggttatgctggaagcggagcatacctgcatgaccatgcgtgggatcaaaaagccgggaagcaaaacggttacgactgttaccagaggtgaatttaaagaaaatatggagcttcagaaacagttccttgctatggtcaaggactgatggacagagtgaatcagatctggaatcatccgctctatcaaaatgagcttaataagcttcaacttctggagactgaccgtgaattctgcagacatacaccggagcattttttggatgtggcacgccttgcctatatccgggcacttgaggaaaatgctccggtttccaaggaactgatctactgtactgcccttcttcacgatatcggacgggccagacagtatgaagatggcactcctcatgatgaggccggtgctgctatcgcaggacagatcttaaacgagcttggattttctatggaagaaattgaagcgatcgtttcggcaatacgtggtcacagagctcagacggatcagacagttcttggaaaactgctctatactgcggacaaaagatccagaaactgtttttcctgtaaagcagagccggaatgttactggtctcctgccaaaaaaaatatgacgatccaatattaggaggtttttccatgaaaatcggaaatcgtgagtttgatgtaaaaaacaaaacatatattatgggtatcctaaatgtcacaccggattctttctcagatggcggaaaatggaatgatatggatcatgccctgaaacatacagaagctatgatcgccgaaggtgctgatattcttgatatcggtggggaatccacacgtccggggcatacaccggttggcgcacaggaggagatcgagcgtattcttcctgttatcgaagcagtaaaagggcgttttgatatccccatctctgtagatacctataagggatgtgttgcggaagaagccctgaaacacggagcagatcttatcaatgacatctggggactgaaatatgatcctgaaatggctcctgtcattgccagatatcaagctccctgctgtttgatgcataacaaagataatactgaatacaataattttattgtggatatgctggcagaaacccaggaatgtgtcaatattgccaaacgtgccggtattgccgatgataagatcatccttgatcctggtgtcggatttggtaaaacatatgagatgaacctgatgaccatggataatctggagcttttccggaagctgggatatccggtgcttcttggtacctccagaaaatccatgatcggacttgcccttgatcttcctgtagatcagcgtgtagagggaactcttgccacatcggtgatcggtgttatgaagggttgtgcatttgtccgtgttcatgacatcaaagaaaataaacgcgtcatccagatgacagaagctattctgggacgttaggaggaactgatggataaaatcgaaatcagagatcttgagatttttgcaaaccatggcgtgtttccggaagaaacagctctcggacagaaatttgttgtttctgctgttatgtatacagaaacacgtccggcagggctgacagatgatctttctgcttccatcaattatggagaagtcagtcatatgatcaccgattttcttcagaaaaatacttataaacttctggaggctgctgtggagaatctggcagagacgctgctgctttcactccctcttcttaaaaagatcaccctccgtattgaaaagccctgggctccggtaggccttccgctgaaaaccgttgctgtggaaattacccgaggctggcatacggcttatattgcttttggttccaatatgggggataagaagaaatacctggacaatgcgatccagggtcttcgggatatgaaagagattgttgttgaaaaggtttccgagtatcttgtaacggagccttacggggatgtggagcaggatgagtttctcaacggagccttaagagtccggacgctgctttctccggaggagcttcttgacaggctgcatgtgctggaacaggctgcggaccggaaaaggatcattcactggggaccaaggacactggatctggatattctgttttacgataatgagatcattgatacagtggaactacatgtgcctcatattgatatggaaaacagggattttgttttgaagcctatggtggagattgcaccgtatcttcggcatccggtgttgaatttaacaatggagcagttgttaaaaaagcttgagggaaaaactttggcggtgtgactttatttattaaataataaaaagataacaagcccgatacagatatctttactacaatctgtatcgggcttgttttgtatcagtgtgaattattgactattatctaaaaaatattttatttctggtttaccaggtcgaattcgtcggtgatctctttggatggtgccttggtaatgaggctgacgatgatgtttgctgcaatggccaccaggaatgcgggaagaagttcatagattccccaggcgccgccgagcgtgctgattccgtatttccagataaataccatggaaccgccacagatcattcctgccagggctccctgccagttggaacgtctccagaataatgccagaagtaccaccgggccgaatacggctccgaagcctgcccaggcaaaggatacgatagtaaacacagagctgttcgggtcgcgggcaataaacatggctactactgcgatgagaagaagcgtgatcttatcggctaccatgctttctttttttgtttctttatccttcaggatacttccgagaaggtcggaagaaactgctgaggatgctgccaggagctgagaatctgcagttgacatggtggatgccaggattcctgcaaggatgagtcctgcaaggattgctgcaattacaccatgtttactgagaagatctgcgatctgaacgataattgtctcagatgcggagccttccagaaggtcaaactctcctgctgctgtcattccaagtcctaccacaccgatcagtacggctactgccagtgagatcactacccatgtagttgctactcttctggaaagtgtaagcttctcttcgtcttcgatcgccatgaaacgaagaagaatatgcggcattccgaaatatccaagtccccatgcaagcatggaaatgatattaagcagtggatatgcctgttctgttccggttgttggatcatatgtagtaaacatagtcagatatccgggcagtgatcttgcatggtctgcaactgcttcaataccacctgctgtgctgatcccgaatacaaatacgatcacaagagcgatggacatgatgatactctggataaagtccgtggtagatgctgccaggaatcctcccagtgtggtgtatccaacgatgaccagtgcactgatgatcatagctggcagatattttacaccgaagagacttgcaaaaagtttaccacaggctgcaaatccggaagctgtatacggaataaaaaagatcacgataaaaatcgctccgatagactgcaggatctttttctcatctctgtaacgattactgaaaaaggatggcaatgtaatggaatttcctgccacatgtgtgtagcggcggattctttttgccacgatcctccagtttacgtaagttccgatcgcaaggccaatggctgtccagcctgcatctgcaataccggtaagataagcaagtcccggcaggcccatcagaagccagctgctcatgtcagaagcctctgcactcatagctgtgacaagtggaccaagctttcgtcctccaagatagaaatcagaactgtcattattgttcttggagcaaagataacctacaaagatcattgcacccagatagacgataatggctgccattatacaaatatgtgctgttgtcattgtttctctcccttccatgtttctgctttaaaatcacaaaacatgagagattttgcttatgcatccccatgctttctgcttttaaaccagttttacacatatttataaattttattatattaactttagaaagtaaagaggatttttcgtttttttacataaaaaagtattttatatgaagaaaaagggctgaaccatataaggcggcccagctctttttcaaaatctctgtttatttttcttccatacgattctgcacatcttccactgtatatgcaagcttctcaacatcctcggaataagtcagcccctccttctcagccagagctttcaaaacaccgatcgttttctgaagatgcatgtagtttcctgcggaggaaccacctgtcagcgcgatgtattctctgtaataattcatgaacatgttcatttccgggctgtcttgattatatactacaacacctattgtatattggatatctccgtcttcgacaacagcagaatgcccagtactttaaagtttttaaaaatcatactgttttgtgcatttctttatttttccgttacataatggcaggctacttcatgtccggactctacttctgtgagcacaggaggaatcgtcctgcatttctccatgcagtgttcgcaacgattctggaatggacagccatggggaacatccagagggctgggggcctcactttcgatgctctcgatctttttctcctgatccatatgaatggaaaactgtgcccccagaagagcctgcgtatacggatgaagagatttttttgcaacgtcctctccaggaattacctccacgatatttccaaggtacataacagcaatctgatgagcaaaggaacggatcagagccagatcatgacagataaaaagcatgctgatgtttttctccttctggagacgtaccagaagccggatcacggattcctgtacggaaacgtcaagtgcagaggtagcctcatcgcacaccagaatctccggttccagggaaagtgcccgggcaatactgatacgctgacgctgaccaccactcatattatggggatagcggtctgtaaaatcttcaggaagctctaccattttcaggagttctctggccttggattccttttcgcttcttttcagctttccgtaattgatcaggggttctgtgagaatatccacgatcttcattttcgggtcaaaggacgccaacggatcctggaagaccatctgcatgttctgacggttcagccaggtttcttttttggaaagatcagagaggttttttccatggtaaaggatctctccgctggtcggtttgtcaagagaaatgaccatgcggacaaaggttgatttaccgcagccactctctcctacgattcccagagtttttcctttataaacgttcaggttcacatcgttgcaggctgttaaagttctgccgccggaagccgggaactgttttacgatatgttttgcactgagtacgatatcggattccttaaacataacgctgtccctccatttccggcactgcagccagcagtttctttgtatagtcactggtcggatgctccatgacttcatctcgtgttccctgatccacaacttttccgttctgcataacaacaagctgatctgccatataggctgctacgccaatgttatgagtaacaatgatgataccggttccgaaatcatcacggagctccatcatctggcgtacgatctgtgcctgtgtagtaacgtccagcgcactagtcggctcatctgcaagaagcagctccgggttaaaagtcatggccatggcaataccaactcgctggcgcataccaccggaaagctggtgtggataacttttcatgatattttctgcgtccggaagacgcattttctgaagcatggaacagcctttcttccatgcttctgctttggatacatctgtatgtgtacagatatattccacatactgacttccgatcttacggatagggttcagggttccgccgcagtcctggaagatcatggaaatgcgggtaccccttaaatttctccattcattctttgtattggaaagcagagaatgtccgtgaaactgaatatctccggtgctgacccggccacctccgccaagtgcgccgaggacagcacgaatcacggttgtttttccacttccactctcgcctaccacactgatgatctcccccttcttcatggaaaggttgaaatgttcaatggtaggtgcctgttttccgtactgaacggaaagatccttgatctcaagcataaataagcgctcctttactcggcaagagtgatatcctttgtcagccagtaataatccattggatacatcttaacacctgttacctttttgttggagaagaggtaggttgtctcataaccaaagaatacagttgcagcatcatccatgatatcctgctgaatatcgatgatgagatcttttctcttgtcctcatcaaatgtctgcgcaagctcgtcaagaagcttgtcaacctccgggttattgtatcctgcagtattgtttgcagaggagctgtaccagttctctcttaagtagttctcagggtctccagtgtttgctaccagcacgttccagatcagaaggtcatactgaccggaatctctcatgtcaagaagtgtctcataacttactgtgttcaggtttacgttgataccgatctccttcagactggcctgtgctgcctgtgcgtatacaccaagctcggcacggcttgtgtagataacaaaatcaagaacaagaggatctccgtcaggagtttctacaaatccgtcaccgtcaacatctttgtatccggcctcatcaaggatcttctttgcgctgtccggatcataggaattctcatccttcagatcatcgaatccaaagtcaagtgttggaggaaccggtgctttaccagctgttgcgccaccctcaagaagagtgttgcagtatgtttccttgtcaaggccacgaagaagtgcctggcgaagagccttatcgctgagtgcatgatcctcattctggttcatgaatgcataggtggaacgaagagactgaagctcctggatgtcgtaattgtcatttccctcaaactcaaccaggttctctgttttcaggttgtaagcgatatcgatctcacctgtctgaagagccatggaacgtgttgtctggtcatccacacatttcagtgtaactttatcaaggggaacttctccatcccagtagttctcattttttactacgatacaggaatccgtcgggctgaaggactctactgcgtaaggtcctgtacagatcggtccttccatggcaaatgtagaatcatctacatttgtatctacgatcagaaacagcgggtctgcaaggcatccggccatgtttgcatttgctctgttcagatggaagatcaggttctgtccgtcaacttcgaggctgtcgagatcaaagaattccggaacacggtcactcttttcagcggtacgttcgatggaggcttttaccatttccggtgtcatatcgtcaccgttggagaattttacgccctcacggatcttgaaggtccatgtttttccatcgtcactgttttcccactcttccgcaagacatggaacgatctcaccgttctcatcgaattttgtaaggcactcgccgatcgcataacgggatacaacccagctgaaatactgctctgtcggctccagtgtatctgcaaagcttgttactccgatggtgatctccttatcactttttttgtcaccttttgcctgagccactgttgccattgaaagggtcatcatacatgcaagtgtagcagccagcacttttttaactacattatttctcatttcatcctcctaaagataatatactgatcatatggtgttggtttgttacagagttgttttattgatcctggcgcggatccagtacatcacggatgctgtctccaagcatgttgaaaacaacaacacagattacgatagcgataccagggtagatcataagccatggcgcctttgccatgtaggttcttccttcattcagcatcagtccccactccggtgtcggcgcagttgcaccaaatcccaggaatgaaagggaagccagctccagcatcatagttccgatatctgctgccgcagttaccaccatctgggttaccatgttgggaagaatgtgtacaagaagaattttccaggtctttgttccgtttactatagctgcctctatgtaaagactcttcttgactttcaagaccatacttcgtgcaagacgggcatattttgtccagcttacagccgcaatggagataacggcattgaccaggtttggtccaagcataccggcaatggcaatggccagtacaagcccagggaaggagatcatcatatctgcgatacgcatgatcactgcatccacaacgccgccgaaatatccggcaataactcctaaaaatgtaccgatgacaaagatcactgcaaccagacataaggtcatgatcagagaggttcttgttccgaagataacacgggaaagaagatctcgtccaagcttatccgttccgaacggatgagcggagcttggctcctgcagtgattcggtcataactgcattcagtggatcatatggtgagagctgcggcgcaaagattgcaattccgatcaccacgagacccagaatgaagaaaagagtgaactgtttattttctttgaatgttcgtaatacctttttcaattatctatcctccttaagtcttggatcgagataagtataggacagatccacaagcaggttgatgcacatgtacaggatcgcgatccaaagtacatagccctgtacaagaggatagtcacgacaggaaatcgcctttactgccatatttcccattccaggccagttgtaaatgatctctacaactgcagtacctcccagaagacttccaagggaaagtcccaacagcgttaccagcggaagcataacattaggaaggacgtgtttccagagaatgacgctttccttgattccacgcattcttgcacctgtgacataatcctgatgaagttcctccagcactgcacttcttacctgtctggtatattttgcagacatggcaagtgcaagagtcagcgccgggaggatcatggatttaaaatccgtactgcctcctgcaacattgatccagcgaagctgaacaccaaagatgctgagaaggatcaggcccagccagaagcttggaacagatactcccacaaaggtaattcctctcacaaaataatccgggaatttgttctgatatacagcggccaggattccaagcggtatggaaataatgaccatcatcagaagtgccagcaacgacatcctcagcgtcggccagaaacaggataccagtttatctgttaccggcattttgaaagaataggactgtcccatatctcctgtaacaacacccttcagccaggaaccatactgcacgagaaagggctgatcaaggccaagctcatgtcttgtctgttccagaagctctggtgtaggaagattaccacactctgtcagcatgatctccgcaggatcaccaggtgacaggtaggtcagtccaaatgtgaaaaagctgattccaaataatacaatgatgatctggagaaatctttttcctacttgtttctttgtcacgttttactcctttcctcatttgatgcgattttaacattgccgttttaatttagttagataaaagaaactattggattcttaatatgcagaatatgcatggaattttagaaaatttgcacgaaaaaagcccgtgacgaaatacgggcacacaaaataaatatgcttcctatcttccgtaagaatcattttaaaacaattgcaagcaggtctcctgacttaggatccttaccctcagacaccttcccggtctatttctcacgcactcgaccagtggtactttgtctgaggatttccccttacagtgacgggatcgtaccggatttacaccggtttccctattaatcctctcagaacttacaacggctgatgtgaaaatcagcaaatgctgtcaaattactgaaacattatatgataaaactatagtttatgtctatggaaaaatgttatatttttagaaaactcataaattttgttaaagatgcttgaattgtatatatcccccatgggggatttgacaattggatttatctaatctgctaaaaaaacacggattttacctcgctatttttacaaatagaatagcaaatggtaaaacccggttttcttactgtttcaatatgatttcagacagaagcgttctgaaaaggttgtttactatcaggtcagagtctccgtgatcgctgcatatgcgatcattggtccgtcttcaataatgttcagactggctgtctgataaagtacgactccgttttcagttgcaatagatgtgtaaagtaaatttccatagtaatctctcagttcacccaattcttctcccttaaagaagtactctccaggcttcttggatggataccagcatccggtatacggcgcatattcatagactacattttcaagaagcatctgacggtaatgcttcagaccatgacatttctttccctggagatgaaaaacaaggtgacggacgtctcttttatcctgttctacttcctcccaggtccagtagctgtgtccgcctctttcgatgagaatacttggaattccaagagaagaagcataattgtaggcgccacctgtggcggttgtggaacggaccacatattttacgccgatatgccgtgccatatgtaatgatttctctgctgtcttttcatctacaacccctacataataaacatagggatgaagctgttcgaacccatctccgctatgcaggtcgatataataatctgctatggaaaaaagctttgtcactatagcataggcaatacgatctgcagctgttccctcaggatctccggggaaaacgcggttcaggttcttgccatcctcatagaccagactcatggtgcgatgctcaaagccactgacattgaccagtggaacgatgatcacatttcccttcagttcttccggttgaaattcttttgcaagttccattgccgcctggattcctacatactccgcactgtgtattcccgctgtgatcagtatcgtcggtccgtctttcactccgcatatcacagttgccggcattgctatgccgtatcctgtgatcttaattttcccctgtgccttctctcctttttcaatcacccagtcatcaattttgatcattggttgtttcccttttccttttttatatttccgcacttttgacgataagtatatcatgcctaaccgaaattgtacatattcttttaagattccgggaaaacagaaaaaagctttcgtaaccgttcattctgatccgacgtacaaaagcttttttcctgaatgatatataatttatctttttaccaattctttggtgatttcttcccagctgactcctttttccaccataagtaccatcatatgataaagaaaatctgaaatttcgtatttaatctcttctttatctggatttttggctgcaatgacgatctctgtgcattcttcaccgacttttttcaaaatcttgtcaattcccttatcaaaaagataattggtataggaaccttcctttggatgttcttttcggtcagtgatcacatcatacacattctggaacacgtgaagtgggttggtatcatcgtactcttttttcagcagcggtttgaagaaacaggtacggtttcctgtatggcaggctgcgccaatctgctccactttggcaaggatcgtatcattatcacagtcaatagtaagagactttacatactgtacgtgtccggatgtcagacctttggtccagagctcattccggctgcgactccagtatgtcatttttccaagcttcaatgttgtgttaaaagcaagctcattcatataggccagcatcagtacttcatccgtccggtaatcctggacaataaccggaaccattccgtcactgtttaatttaaagtccgaccatgcaatattacttttatatgtgtttaccggaattccggcttcttcgcaggtttccttaaatgtatgcagatcattttcaagactgcttacataagcaccgcaaagtccggacacagctggttctcctaaaagctccagaacgttctcagatctgttttcatcggtatgaagaacaatggaaatctgagaaatctctgcaatttcattttcgacagtgtccaaagccagaacagtgtctgcatatgtttcgatcagatcctgattttctgtgaattctctcagatcagagatgctgatcatcatacgctcttttccaaagcgccgggatacttcttccagaagcttgatattattctctttcgaaaaattcagtacaactttggcacatcccgcatagatcagcttttttacatcttccatacgtttgatatttcccgctgcgatcaccgggatctcagatacctgacagatatcacggatttttccgatcgcacggtcatgctctgcatctgcggaagaaaagtcaaataccagaagctcatctgccccattgtcaccgtaaaattttgcaagtgtttctacatttccgtctccgaaaagatttctctgtccaaatccggttaccgccttttctgaatgaagataaaggcatgggatcaactgtttgttcataagtggtctccttctgtatcagaggcttcccttggtagaaagcacgtctgtgatccgggaatcgtactgtgttgctgcatcaagggctttcgcaaagcttttaaacatggcctctgccacatgatggctgtttcctccggaaagaaccttgatgtgaagattcattgctgcggaataggatactgcataaaagaattcctttaccatctctgtagccatatctcctattttttccgtagaaaacgctgcatcccatccaagataaggtcttccggaaagatctactgcgcagagcacaagcacttcatccataggaaggatacagctgccgtaacgtttgattccttttttgtcgccaactgcctcacggatagcgtttccaaggacgatccctgtatcttcaatggtgtgatgatcatctacattcagatcaccgtggactctcagcgtaagatcatacagtccatggcgcgtaaaaccgtccagcatatggtcaaaaaagccaatgcctgtatcaatatcggaacttcctgttccatcaatattcagctgcagacgtatctgcgtttcttttgtgtttctttcgatcagtgcttctcttgccattattcgttctccttgtcctcttcctcaaaacggactgcaatggaatttgcgtgtgcagtcagctgttccgatgtggcaaactggataatgtccttgtggatttttcggagtgctttcctggaataatatacaatactggatttcttgataaaatcatctacagaaagtgcggagaaaaattttgcggttccattggtaggaagcacatggtttggtcctgcaaaataatctccaaggggttcagagctgtgctctccgataaagatcgcacctgcatttcgtaccttcatcatatcttcaaaaggattctttgtgacgatctccatatgttcagaagcaatttcattggcagcctcaatggcctcgtccatatcttctgcgatcaggatataaccaaagttctccagggatttctcaataatggcttttctggaaagtacctcaacaaaacctctgacttctttatctacctgatctgcaaattcctcatttgttgtgatcaggatcgcagatgccatctcatcatgttctgcctgagaaagaagatctgctgcaatataacgaggatttgcagtctcatctgcaagaacgaggatctcgcttgggccggcaatagaatcaatgcttacgtatccataaactgccttttttgcaagcgcaacaaaaatatttccgggtcctacgatcttgtcaacctttggaatactctcggttccatatgcaagtgctccgatggcctgtgcaccacccactttatagatttcatctgctccggcttcgttggcagcaacaagtgtgcttggatttacttttccgtcttttccaggaggtgttgtcattacaatacggtcaacaccggcaacttttgcaggaacgatattcatcagcacggaagacggatatacagcctttccaccgggaacgtaaacacctacacagttcagagcagttaccttctgaccaagcatggttccgtctgttgtgcttgtgaaccagctgttctgaagctgcttttcgtgatagctgcggatattcaccaatgcttttttgatcacatcgatcagggaaggatctaccagcttgtatgcttcctcgatctcctcaggggttacacggatcgtatcctttgtcacttcgactttatcaaattctctggtaaatgcaaataacgcggtatctccctctgcttttactttggcaaggatatttgctactgcatcctcgtattttccataattattagggcttctttttaagagagtttccagaatatcttttgtagattctttggtgagttttaccttacgcataataaattctgccttctttctgtattttggaggttcatctgttgttcagtttatttgatcacacttcgaagttctgtgatcagtttgcggatccgttcatcttccattttcatgctgacctgattgactaccatacgtgcagacagcgggcagacttcttccagcaccttcaggccattctcgcgaagggtgcttccggtttccacgatatccacgataacctcggaaagtcctacgatcggtgcaagctcgatggaaccgttcagcttaatgatctccacagtctgatgctttttgttatagaagtaatcctttgcaatatttggatattttgtagctacacggatcagctgattgttattcaggacttctctggcgctttcaggaccgcatacgcacatgcggcatgctccaaatccaagatccataacctcatatagctttcttccttcttccagaatggtatccttacctacgataccgatatctgctgcaccatactctacataagtcggcacatccggaccttttgcaaggaaaaacttcagcttcagttcctcattggtaaagatcagctttcgggaatctttgtcacgcatctcctcacatgtaataccgatcttctcaaacatatccagtgttttgttggccagacgcccttttgtgagggcaaatgtaagatatctcatcagtcctgctcctcctttgccgggcacaatgccacttttttacctttattccgaagctccattgcttcctggatcgcttttttcagatttcccggatcataggtgatcacaatggttttatcgccagccggaacggtcagcttctgtctggaaagcgcgagcatcaggttatcaaccacaatggcaaatccaatggaagaagccggttttccgaaatgcttcatcaattcgttgtagcgtccgcccttgatcaggggttcaccggttccatatgtataagcctggaaaatgatccctgtataataacggaacttactgagcattccaaaatcaaaagcaatgtatttctcacagccgtatactttcaggatctcataaatttcttccagtcgttttactgcagaaagtgcttccggattggaggtgagtttttttgctttttccagcacttctgctgaaccgaacatctgaggcagttcagcaaaagccttagaaaggttatcgcctaaattctgtcccttaagaagctcttccacaccaaaataattcttctgagagatcagctcacgaagatgctcttctatctccggctccagatctgcctctgcaagcagggatttataataatccacctggcctacgctaacctggaattcggtaagtcctgctgccttcagacactccacagtcatagcaaggatctcagcatctgctgctgcagaatcatctcccatatgctcaacacccatctgagtattttccttcatctgacctctgtaactggaattgttgataaatgtatttccggtataacaaagtcttacaggtcctttttccggatcaaaataagttgcacatgctctggaaacagacggtgtaaagtcaggtctgagaacaagtgtgtttccctctctgtcaaaaaatttatataaatccttggatgggatcgttcctacttcattgctgaacacttcaaaatactcaaatcccggtgtttctatatcttcatatccatatcttgaaaacacctggtggagctccttctggagccgttttttgcggctgcattcttctccataaatgtcccgcacaccttcaggtgtatgaaaaatacgctgcatgttcatttcctccgtaacacgttttgagattttctgtgtttcactttaattcgctaccatgctaccacagaaaaacttaaatttgattatataggaaacctttccaaaagtcaatcccgtaattgcagatctttctggatcccttccagataaggaaccagaaatccattttttccggaaagataaaattcctcatccagctcttcccgacgaaaactttttcgcccgccatcttccatccttttccagaattccttcagcttacgaagggtaagataataaaaaacattatctgcgctgaaatagatcagaaaaaaagcaatccccttctgcttttcaaactcatccataaatgctacctgatgaggatgaatgttcgcaaggggaaaagtttttacacagcattcttttgcatcgaagcagacagggattccctgtactgctccgatataatctacggtacttttctgttcaaaatatgccagcgtgatatgccgggaggttttatccattttaaccggagtgataggtgtcggaattttctggatgagggccagtcccttttccctgtactgctcattggtacgattgataagttcctccagagtagaaccacgaagtcctctgctgttccatgttgccataaagtctgtcctttaatttagaagtttgatggatgggaaataacggatctccgcttttccgacgatctgatcaaactgtacatatgtattctgccagtatcgggaatccttagaattgttacggttgtctcccatcataaagtaacagttttccggtacttcgtatggtccgaagcttccaagaggagtttccgacacaaaggaatcatccagaggtgtctctgaatcattgatataaactttaccatctttgatctctactttatctccgggaagaccgatgatacgtttgatgaacagctgggactcatcatccggatatttgaagatcacaatgtcaaagcgttccggatctttccatttttttgagatctcgtgaccaaatacatccatattcagaccataggccagacgatagccaaagatacgatctccggtcataatggtattttccatagattctgacgggatctttgcattgatcagtactacattgttgataaccaggactacaactaccacgatgatgatcatcttgacgtaatcccatatttcattccagattttcataataactctcctccaacttttcctcttttagtgttctgagaaagatttccggaagcggtgccgtaaagaccttcccggataaatatgacaggcttcctttcatagatggaaactccattcgaaaagaatgaagcagctgtcctttcagttttttatcggcttttccatatttgggatcaccaacaatcgaatgtccctccgaagcaaggtgagctcggatctgatgtgcacgtcctgtgatcagttcaaccttaagaagggtacgggttccattggtacccaacggataatactttgtttccactggaagggcattttctttctcttgtttatagatggttactttattgctttttttatcttttgccagataacctttgatatatctttcttcttttaaaactccctccacaagacagaggtaatatttatgaagttccctggacttgaacatccctgaaagttcctgcagaccggaaaggcttttgcctgccgctatcagcccgctggtattgcggtcaaggcggttgcatacggaaggacgaaaggttctcagatcattctctgtaagagagccatttttcagaagatagccggtcagatattctaccagtgaaggggttccgtcatcagcaggctgagaaagcattcctgccggtttgttgatcaacaggatattttcatcctcgtaaatgatatccagagcataatgtgcccgtggagcagaatcatttccgctgaatttttcaaatgtttcatcacttaaaaacagttttacatgatctcctgaaaacagcttttcattcccggtggctttttttccattgagcgtgatattttttttcctcatcattttgtagaaaaagctctttggagcttcacggagaagcttggccaaatatttgtcaaaacgctgtccggcctcgttttcgttaatgataaattctttcattatataatgctcctacagacagattgccaggatcgtatgtttgatcagttcttccctggaaagatccgggtatcgctcatccggcgtgaatttaatcccgtttctcaaagattctttgtgctcattcatagaatccagacgttctagatagggtttcaggtccctcaggatctttacatctactttatatccgtttttacggatgattttctgtgactgctctgcaaggtaggcgatatctgcttttggatcactggtgtaacccactactgtatttccgcacacggcaacagcgtccagataaccgcttttctcataaaaagtcatgtacatttcataggacatgaccaagtcaccggcatgcttgcggatctctttatagagcttttcatccataggatgacgtaacaggatcatgatcaggcttaccatggatttacatcctggcagacagcctactacggtcagaaccgtccagactgtcattcttgttccgttgacggcccacgccacaaagaaaatgagcagtggaagcgaaaataatcctgcggtgatcaggagtcttcgttttttttcgctgttaaaataaccgaaatcacctttttttgtttttctttttctggtatctttcatgtgccgaactccttgtctgtgtttttttgttttttttatgaagctctctgggacggatcagacatttcggtccaaagccgaccagatccatacgtccggtcatcttaagtccttccaggaccagttcgcgattttccggatttttatactgcatcagtgctcgctgtattgctttttcgtgtggatttttcggcacatataccttttcgcctgtcagcggatggattcctgtgtaatacatacaggtagaaagtgttgatggcgttggataaaaatcctgaacctgctccggcgtaaatccaagatcacggacgtattccgcaagcttcacggcttccttcattgtacacccgggatgggacgacatgaaatacggaacggcatattgctgcttaccagtccgcgcatttgctttttcatattccttcagaaagccctcataaacctcgtgcctaggcttgcccataaacttcaggacttcatcagaaacatgctccggtgctactcgcagctgaccgctgatgtgatatttcacaagctcattaagaaaagttttatccgggtctgccatcagataatcaaaccgaatgccggaacggacaaaaacttttttaactttggggatatttctgacctttctgagaagctgaagataatccttgtggtctaccgtcagattcttacacggagaaggaaacaggcactgccgttccttgcagactccttttgtcagctgctttttgcaggaaggataacgaaaatcagccgtagggcctcctacatcatggatatagcctttaaaatccggatcctccgtcatcttttcagcttctttcagaatggaatcgtgacttcttgtctgaaggatgcggccctgatgaaaggtcagcgcacagaaattacagcttccaaagcatcctctgttgctggtcagactgaatttgatctctttcagtgccggaatcccgccttctttctgatacatgggatgatatcgtcctgtataaggcagatcgtaaacatcgtccatttccatctgcgtcagaggctgagatggtggattctgtatcacatatccacggttcccataagattctgccagaggctttgctgtaaatggatccgtgtttcggtactgaatggcaaagctgtccgcgtaagcttttttatcggtctgtacctgctcaaatgacggaaggaccaccggatcgtaaaccctgctgatatcgtggcttttaaaaaccgtccctgccacatatgtgatctcctggaccggaatcccgctttgcagggcttctgcgatctccaggatggaatgttcccccattccataagagatcagatccgcaccggaatcgatcagaatactgtgcttgaccttattttcccaataatcgtaatgtgccattcttcgaaggctggcttcgatcccgccaagaatgataggcgtatgtttataggtttgccggatcagattgctgtatacaacagaagccctgtccggtcttaatcccatttttcctcccggagaataggcatctgtgcttcggtgctttttggaaaccgtataatgattcaccatggaatccatgtttccggctgtaacgagaaaacccaggcgcggttccccgaacacctggatgctctccttctttcgccagtcgggctgagggatcatgcctacacgatatcctctgctttccagaagacgtccaatgatcgcagatccaaaagacggatgatctacgtaagcatctcctgtcacgtagacaaaatccaactcatcccagcctcttgacttcatatcttctcttgtaactggtaaaaaatcctgcatttataattcctcgtatgtatgtgtattagtactgtctgccctgtgttcatatactgtgatggactgcctgggcacgataaccctctgcaatgatatccagctgcctgtggaagcgttccagctgacgcagatccttggttttgaatacccgcaggaactcatcctgtattttgctgacttcccgttcactggaaacacggtagagattttcaatattattcagaatatcctttacaagattggactgcatctgagatgaattctgggcatccatgatctcattgcgcacagaagacatttcatgatccagcgaaatgatcgcatcggatgctttactaagacgttctgctacatgaggaggcatatcacctttgtatttatactgaagggaatgttcgatcgttgcccagaaattcattgccatggtacggatctgtatttctacctgaagccgtttcggcccatgaatagtctccactgtataataaaggatcatgtgataactccggtaaccgctctgcttgatatgcgtcagatagttcttttcacttttgacttccatatctgttctttttcggatgatcgcagcaacggtatcgatatcttcttcaaactgacaaatgatccgtactcctgccagatcttccatttctgtttccagctgttcgatcgggatatctttacgctgcattttctccaggatactggaaacgctttttactcttccactgacttgttcaatgggagaataacgatcattttcgtgatactcttctatcatatgtttaaacttgactgtcagttctttgacagccagctcgtaagggcacaaaatacttcgccataactgtatttccatgttgctcgctccttatcatctgccgccagtctctttttggttttggtgacagcggcatacattttttattataacatatgttttgaaaaaaaagggattgtttatcaattttttattaaaaaaatatagaattattttcctttttgtgtgatgcatccacaaatctatatatatgtataattctgtattttatgaatattttttatcagggcataaaaataccctggagaaaccttacgtctctccagggtaaaagtttgaacatactccgaacgggatcagtctttcagatttttgagaacctgtacaagatagttccatactctttctgtggaagcaatgctgagaacctcctcggatgtatggatatccttcatatccggtccaagggatacacagtccagtccttccatttttttatagaaaagcccgcattcaaggcctgcgtggatcgctacgacttcaggcttatgtccgtacatttcctcaaaaactgcaaccattttatctcgtaatggagattcctttctgtactcccatgccgggtatgcaccctgtacttcatagtcaccaccaagaaattctgtgagatattcaatcttatcagataatgcactgcatgcagcgtctacagagcttcttacactggaacttgcaaaaagctcgtccctatccagacggaggataccgatattgctggaggtttccaccaggcctttgatggttccgctcattttctggattccgaatggtacattctgcagataaaatacgatcttttcctgacttgtaggatgaagaacctctgctgttgcagtacccttttctgttatttcaaaagtaatgttttcgtcagaaccagtatattcttcacggatctgctcctggagctcttttgcgtaagcttttacctcagcaacggaatccgtaagaaattctgcggtgcactctcttgtaatggcattgtctttctgtccgcctgtaagagaaataagggcatattccgcttttttcttaagtccgtaaagaaaccgtcccataagtttattggcatttgctctgttcttgtcaatctcggcaccggaatgtccgcccataagcccacagactttgacctgtaccttttctccttctccttctacgcgctggacagggatatggctgataccggaaagaccgccggcacagctgatccagagacttccctccgcttcagaatccagattgataaatcttcttcccttcagcacgctgcagtccagaccgactgcaccaagaagaccaatctcctcatcaaccgtgagcagtacttcaagaggagggtgtggaatatctgtactgtcaagaagggcaaggccataagcaactgcaataccatcatcaccgccaagagttgttccgttggctgtgatataaccatcttttacagagatgttcaaaccatcttttgtaaaatcatgatctacatccggtcgtttttcacataccatgtccatgtggccctggatgatcactgtgggagaattctcatatcctggtgtgcctggcttgtagatcactacattattcagctcatcctgtacatatctgaatccatgatccttcgcgaattccacaaggaaatcactgatctgttttgtatttctggaaccatgaggaatcttgcagatttcttcaaaataatgaaaaactctctttggttcacaattttctaatactggcataaattctgcctccttctgcttcataaattcatttgtcttttataataatcatatactgtaaaaaaagcaaggacctgtttttatgaaacgaaaaataatcatatttttctatatctgcctgttgttttttctgctttttcacccaaaagaagctcttaccggagtaaaaaatggacttggattgtggttgaatatcatgattcccactctgctgccatttctgatcctgacaggagcattattaaaaactggaaatatccggaagcttctgaaaccatctgctttcttctggaaaacgtttttcgggctttcacctgctggagcctatgttctgatcctgggtctgttatgcggatatcctatgggagccaaactggcacatgatctgtacatagaccagcagatttcccgcagagaaggggaatatcttcttacgtttagctgcaatgcaagtcccgcatttatcatttcctatctttccgggatgctcttgaaaaataagatatcagcagtacagatgatcctcacttttctggcggcagatctcttttgtatgctgttttttcgtttcgttgtatatcgtgggcataccgtggactctgtctgcgtaaacaagataaaaaaagagacataccaacaggactccataggagtcattctggatgtctcgatcatggacggatttgaaaccatcacacgtctcgggggctatattctcctcttctcactgatactcgccagtatcagcttttactggccatttcatgcacaaagctgtatgctgttcacagcaccactggaactaactaccgggctgaaacagattgccggcgcaccactgccatggaaaagcagataccttgcttctatgctcctgacttcttttggtggcttttgcgtcatggctcagacaaaaagcgtattggaaaacagtttgtcactgatcccctacgctatttcaaaatgtctgaacgccagtgcgatattcctgatcctagttttctccgatatcgtctaacagatcttcgtcttcttttgttatagaagaactgtcatcatcctggaaggtattggagattgccgctgcctgagcagtctgtggtgcaagctcctgacgattatgattaacaacctcaaggcagctctgcagagcatcaataaatgctttgtatttaccaccggcatcttcaagtgtctgattcaggacagaaccgatattagccatcatatcatctgtgtatgtgatcgcactgagacgaatgctgtttgcatcctgtgttgcagaatcaagaatctcctgagcctgcttgtttgcagcatttatggtctcatttgcctgtgcatatgctttctgcatgatctcatgctgtgtaacaagttcctgagctttggcctgagcatctgcgatcagactgtcagctttagcctgagcatcctcaaggatcgcatccttattgctgatgatcttctgataacgtttgatctcatccggagttttcagacgaagttcacgtaaatactcctcaatctcttctttgttcactacgatcttggtagtggaaagaggctggaatttacagctgtccacatactcttcaatctcctgaataatctgttcaattctgctgctcataatacactctccttatttctctgtttctctttttttcaatttctcttcgactgcatccgtaatctcacgtggagcgaatttgctcagatctcctccgaaattagcaacttctttcatgatcgtggagcttaagtatgcatattccagactggttgtaagaaaaacggtgtccacatccggtgccagaacacgattagtctgggccatctgcagttcatattcaaaatccgtgacagcacgaagccctcgaacgatcacctgggcatggttttccctagcaaagttcactgacaggccctcgaatgctttcacctccacattcgggatatcttttgtcgcctttgttagtatcttaacacgttcttctacagaaaacaacggactttttgcagaattatgcaaaactcccactataacccggtcaaatgaaatgcttgcccgcttaatgatgtcaagatggccataggttgccgggtcaaagcttcccgggtatactgctgttatcatatgtctgtctctctttcatttttttaggaaaacatgcttgttggttttatattccttggaacgtaccagatgatatccaaggtcctctacataagaaaaatccgtatgtagatcttcctccacaacgatcagcgtgttttcatctgcaagagtgctgtcagccagatactcaaggactggttgttccagatgctgttcgtatggtgcatccataaaaatacagtcaaatggttctccgccttccagtgaacgcagtgcctgaagcacatccatgttcagcagtttaccaccatccgtgagttttgtaaatgaaagatttttgcggatgcaagtacatgctttgggatttttttccacaaacacggcatactcggctccacggctcagagcttcaataccgatcgctccgcttccggaaaacagatccagaaaccgacaacccggtatttcaggctggagaatgttaaaaagagtttccttaatacggtctgttgttggtcgtgtctcatttccgggaatggtttttaagtttaatctacgtgcttttcctgctatgactctcatttcagatttaatctccaatccagatcaccgcgggccagtccaaggatcagaagttccgcagtggcaatatttgtagcaaccggaatgttgtactggtcgcagcgtttaacaatgctcatgatatccggctctaccgggtccatcatgacagggttataaaacaggatcaccatatccagatcctgacgctctaccatctccataaactgcttgtctccgcctatacttccggcaagaaacttgtgaacgtgaagactggttgcttcctcaattcttcttcctgttgttccggttgcatatacttcatgtttggcaaggatattcttgtatgcaatacagaagtcttcaatcagaactttcttactgttatgcgcaataattcctaaattcataattcacctctccattctgcccttgggttacatccctttttcccctttatataggtaaaatcatataactctgtaactgattctagcataacgcccaaaaaagtgcaatttaattcatgtaaattcatgaaaaattaatattttccccggcgttactccatatactctattcttcccagctgtttcctgtagtataatcaatttcaattcccggctgtatgttataaacaaaaacatggaaagatatcttctggtctttaacggattcggcttccatttccacaccccgggctaccagttcatctcccttaaaaaacggagttacacgatacatgcagggatttcctgtactgtgcacgtaatctgcaacctcattttcaaaaggaagcattcccgtcacattgagatatctggttcctgtgataagatttttcctgtttgcattctctccagtcagctgatatccgataagatggcagcgattatacagatacctgccatctacattttcatattttacagtatgccatcctgtaggcttcaccattccgatcgctcctcgctcttcatcaggcatcagctcaggtgtgatcttggattctgcataaccacagcgccccagggaatctagttcactataaaattcgtatgcaggtcctgcgcttttttcatcagaaaaagagggtatatttccattgatctccacatatggactgccgctgtattccggaatctgatccagagaaacagattctgtctgccctcctgtcttcgtctgagattgtttcagtaatcctgtcactgcatcggaagcggattccgaaatatcttcccagaggatctgtgcattttcttctatatatgtaagaaatacctgtccgaagatccggctttgatcttttacctctttcaggctccgcggcggcatccagccattacatactgcaaggatgacacacaggataatggctgtaagtatttttcgcctgggctgtttttttcgtttatattttctcttgtatgtaggataacgcttctttttcacgggacccccttacttttttgtctgacagatattatatgtgatgcggagattattataaccgcaactcccgtcaaaaagcaaccatacattcgttttttttaccgcggtataatttatgaacggaaatattttatatgttaaatttcctttaactgccagtgtattattttatggttttcacatactagcaatgtaacatcaaaccaaataacaaccaaggaggaaatgaattatgccaagtaacacttcttctaacaaagcagttgtaccggaagcaaagggcgcacttgaccgtttcaaatatgaggtagcaaacgagctgggtgttccgcttacagacggatacaacggaaacctgacttccaaacagaacggatccgtaggtggatatatggtcaaaaagatgatcgaagcacaggaacgccagatgtccagcggctcccagggcggccagcagtactaaatctgtacgcgcaggtagatctattactatgctgagttgatctaagctcatgcaaaaaagatgctgtctgacagaactgaaaacctgccagacaacatcttttttattttatataagatccaaaagtcttaaaatcctatattcatttacagcaattcctgtacttttcgatatacaacctctgcaaatttcttatgtcctgctgcattcagatgttcctgatctgcgtcacagcaatgtacataggatgctgccggaaggaaactgatatgacgttcagctgcgattttttcataaacaggctgcagatttctggaaacgatcacagactctctggaaaactcctggtcatatccttcctgccatactttttctcccagatagatgggagacatgagaaggactttcgctcttggtgcgtattcctggatctgatccagcagtcttgtgattccctttccaattacatctgcggatgctccaaaaacagttttgcagtcattggttcccagcattagagtgatcacatccgcctgggcatgtgtttccagaagtgtgggaagaagtgcagttccttttcttccgtcgcggagcggatcttcgaaaaccgttgttcttccgcacagtccttcctcgatcacgcgatattcttctttattcagtttttcctggagaaggcttgtccagcgtactccccacggtagtctctctctgctctctccgtcatatccccatgtattggaatctccaaagcataatacctgtttcatttcaccatatccctatctaattagtatgtttatttgctaggtgaatcatatcatgctattctcatttggtcaaatacacaaaaaaaatagcctgctatagtttgactctatagcaggccatcttacatactcttttatatactttttatcagagattctttttacagtccgataaatcctataacatctccgttgatcacataatgtgcaccattatcttcgggtttaatgtagattttgagatctttcagttcagaagcttttttgcccatatcctctgtccagatctttttgatcctgtcagcaacctctgaagtatgtatctctttgccccagtactgaacatatacttctgtcactggctcagctttcttagctgctgttgtcttagcagccgtcttggttgttgttttcttagctgcagttgcttttcgtgttgttgtcttcttggcagcggttttcttagctggctcttctgattttacagctgttgttttctcttcagcagattttacttctgctgttttttcttctactggtttctcagcggcaggttttacctcagctgtcttctcagctgcttttgtttctacagaagcttttgcatcgtctgtcttcgttgtctcagccttaacggctttctcttcggatgcggttactacagattttgcaggagtctcgcttattgaagccgtttttacagttgtcttggttgcagctttctttgttctagccatgtttatagcctccttacaagggatttgttaatcttttctcatgcaatacaatactacgatttgaaagttttgtaaagaaaagtttcaaaaatctattagttaaggctgtaatttacagcatgtacacgataagttacactgcttttactatatgtccagttatgacgcagcagacaattatgatgacgtccgtccccatccagattacactctatcactttaaatgaatcactgtaaacttctgtaacgatagccgaatgtccattattattgatgcgcacatagtctcctacctgaacattattatcatatattctctgaaggcctgatactctctgcccttcccagatatcataaaatacttttcttgcaaacccatcacactggatagccccgtcaaacttattgcaatcatactcgccattacctggtatcggatcaattccgctctgagttccgtgatgtttgcatggaacatcactgatcgtatcctgaaatctttcaggagctccgctgctgtctagattatctgtcagatctgaataactgtttacaacatggttccaaaatttcccatcaggaaatttgattttttcatcttcaattctctgctgcagatttttctttttaataacagtaagattaacaattaccggcttcgctgcattataaaacgttgtactttttgtagtaactgtgatctgcacttctctctgaatatcgttttcttgccattccttcaaagtaaccgttccatcagaagctaccgatgcaatagcactgttgctgctggaataaaccaatgtcgcattctgatctgcttttgccccgagattgaatgctccatcatagatcttacgttcctgctgctgtacacagctgacagatggagttccttttaccgtagtgatcgtcagtttcctggttgccggagcataggaagaagatttcgctgcagtgatctggattgtaacttttccaagcttctttgcctttttaaagttcaaattacctttggaatccacagaaacaatactggtatctaaggacttataagtaagtttcccaccttctgaaggaactttggcaccaagagatttcattgtagtggaatacgctatttttgccccattctttacagctgtggtaatattctgtcttttcagcacattaatcttaattgcaatattctgtgcctgataatgtttggtcgccgcaacttttacagtaactgttgccactccctctccattaagcataatcttgctattttttacagatgcaatttttgcattagtggttgaatatgtcacttttgcaaattctttttttcctgaaacactgattttgtaggatttgcctttgtctgtataaagttttgtaatacttcctggtgtaacttttaccggctgttttgctttgctgatcttataagctattttttttgtacctgtaaaattgccctttcctgtgatttgtaaggttgctgttccaggttctttattattaagatatttatatgtataatctttttcattctgtaatgagatcattccggccgcattggctttcggcatataaatagaaaatgcgggagtttttgcctgtccatcccaggtgtaaatcgttgtcttcaaattaacttgaactttaccgtcaagactgcatgctttgatggtaaaatatttagaaacagaatctttgtaacttccctttcctgtgatttttgcaacagcttttgttcccgtttttgtattattagaataagttactgtataatctgtgccgctttttaatgttgtatttccaagtttaacagttacacctggcttctgcggacttccattgtaagttgcggtttttacagttacctttgccgttttgatgctctttctaactactggttttgaagcaactacctttaaagtgatacatttactgttcgttggcatggtcgtatattttttgcctgagctgtctgacatggtaaatggaagttctatagagcacttcaggttcgggatcgttttcagtgttttaagattatccatatagtacagcatatatcttgcatcattgacgctagatgtattaaacttactgaggtttagagattccaggctgctacaggagttaaacatatatcccatctttaccacttcagaagtattgaaatggctcacgtccacagcttttaacgcatagcagcgtgaaaacattccttccatagattttacttttgatgtgttaaattcagaaacatccagagaagtcatttttttaagttcgccaaacatagaattcatatctactaccttggatgtatcaaaatttttaatattgaggcttgttaaagactcatttccataaaacatgaaatacatattctgtacattagaagtattaaaactgttcagatccagagacttgagcttgctcatagtacagaacattttgcccatatcttctacatttgatgtattaaagtttcgtacatttaactgtgtaagactttcgcaccgttcgaacataccgttcatatatacaacatttgctgtattgaaattactgacattcaactgtgtaaggctttcacagcaataaaacatctcctccatagtcgtaacattcgctgtattaaatctgctgacgtccaactgtttaagattccgacattcacggaacattccgctcatccttgtcactctggaagtattaaaattccggacattcagctgtgtaaggctttcacagcctaaaaacatgctattcatatcattaacttttgaagtatcaaatttactgacatccagagtttttaatttactgcaatttcggaacattccctgcatatgagatacatttccggttttcaatgaaccagtatccagctgtgtaaggctttcacaatctgagaacataaaggccatgtctgtcaccttactgaaatcacagtttttaaaagtgatcctggtaagattcctgcatcccttaaacatagctcttgtctttgtgattccggaaatttcaactatggctgttttaatatcatcctgccatttactccagcccctttctgcatcccaataataatctgaggtatcatagtcaccgtttccttttaatgtaagacatccggatgtatcaattgaccaggcaatatctccggtgattcctccatccatcatgcttgcggaagcacttacagcatcttcttctccatcagaaaagtcatcactttctgccatttcttctgtttccggttcttccgaaagattttcagtgtcctccgacatttctatgttatccgcttcttccggctcttcttctaattcctgttctgtgctatcaggtaattctgctgcttcatcgtctgctgagattccatcttcaaaaatatcttcctcagaaaaactttcctctggactgtcagtctcctcatttacattttcctggactgtttccggttctgtctctgaagccatggttatccctgcattgccaaagatcatagaccctgataaaacgacacacagaagttttttgatcatttttctcctcatcctgttttctccctttttctttttatactaaaacgaagttctgattcttcgctttgctccatccaattagatccccagattttccagttcttcactcatataccccttgagatgctcctttaaagccttatgctgaggcaggataagatcaaaatccagtgccaggatctcaccagctgcttcacttgcattcttcaggattcccgcatcattgtagatatcaccgatcttaaattccatcagtccgctctggcggataccgaaaagatctcctgggccccgaagcttcagatcttctccggctatataaaatccatcattggattcattgaggatcttcagacgtttagaagtattttcttcattatttccctggataaaaatgcagtaagactgatgctctccacgccctacacggccacggagctggtgaagctgtgcaagaccgaatcgttctgcattttccaccatcataacggtagcatttggcacattcactccaacctccacaaccgtggtagataccagtacctggatctcatcggaagcaaaggcctccatgatcctgttcttttcttttggcttcattttgccgtgaaggatctctactctgatctcgtcaggcaggacttcctgaagctttctggcataatctgtgacattctctgcatccagtccttcgctctcttccaccattgggcagatcacataagcctgtcttcccatctgcacctgcttttcaataaaagaatacgccttggggcggtaggaagttcctactacgcaatttttgatcggaagcctttttgcaggaagctcatcgatgatcgaaatatccagatctccgtataaaatgatcgccagtgtccggggaataggggttgcactcataacaagtacatgtggcggatttcctctggtcgtcagcgcttccctctggcgaacgccgaatctgtgctgctcatctgtgatcacaagacccagattcttatattccaccttttcctggatcagggcatgagtaccgatgatcacattcacttcgccggttgcgatcttctgatagatttcacgcttctgtctggctgtggtagatcctgtcagaagaaccgggtggcaggaaatgatattctgctcttccatcagcttcagaaagccttcgtaatgctgattagccagaacctctgtcggcaccatcaatgcactctgaaagccattttctgctgaaagtaccatagctaaaaacgcgatcacagttttaccgcttccaacatctccctgcacaagtctggacatcagcttatggctgctcagatctcgttcgatctcgtgccagacattcttctgagctccggtcaggtcatagggaagcccttctatgatttcctcggttgtccatactggtttcattggaaaagtgtttggagcctcttcggttttctccttcagaagctgtattgccagcacaaaaagcaggaactcatcgaataccagacgtttcctggctgtgagaagctcctgcatatttttcggaaaatggatagtccggatcgcataattggcatccgcaagctgatagcgttcccgtatttcctccggcagatattccccatggagaggtcttgtatccaaaatctgatgtaccaacttcgtgatcatcttgttggaaagacctttcgtcagaccatatacaggctgcatactgtgaatgatctcctcataagctgccggggtaaaaatctccggatgttccatttgaggacggcctttttttctggtgatctttcctctgaggataaaaacactgccctttttgagtgttcccctcaaataaggcgcattgaaccaggcaaccggcaatcggccgcttgcatctgccacagttgttgtcagaacctggagattgcgtacctggttaatataaatacctgttgctatagtgacacggatagagactgttttgtcctcctctgctgatgcaatctccacaggctcctcatatatatcgtaagtccgcggataataacggagaagctcttccgcagtcgtgatcccgatcttctggaaaagcttctctgttttctcacccacgccttttaattcacgtaaaggtgtcttttcattcattttttgtgctctttattctacagaaatcagatagtagtaaatcggctgtccaccctggttcagctcaacctcgcactccggatatttctcagtaagagaatcagaaagtgcctctgcatcttcctcagatacatcttcaccatagtaaacgctgatgatctcagattcctcgtcaaccatctctgctaccatctcctccgctacctgaagtcgatctctgcctactgcaaggatgcctgcatcaccgattcccatgatatctccctcatggatttccttgtcatcaatacgtgtatcacggactgcataagtgatctgtccggttttcactctggaaatcgcatcggtcatggaagcaaggttctcctcgccgcccttttccggaacaaagctgatcattgcggaaattccctgtggaatcgtcttggttggtactacaatgatctccttgtcctcagtcagatctcttgcctggttagctgcaaggataatattcttgttattcgggaaaatataaattgtttttgcatgtactttctcaatagcattgagcatatcctctgtactcgggttcatagtctgaccgccttcgatcagataatctacgccaagctcacggaaaatctgagaaagtccctcacctacggatacagaaataaatccgtgatccttcggaggttctttattttctgcctgttcttttgcaagtttttcagcgtctttgatcagtttttcctgatgttcttctctcatattgtcaatcttcatgcgggaaagctgaccatacgtgagtgcacgttcaaaagcctgtcccggatgattggtgtgtacgtgtaccttgacaatctcatcatctgccaccagaacaatggaatcaccgatggaatccagaaattcacggaaacgatcgatctcctcctgtggaagcggtttttcaagaaggataataaactctgtacaatatccaaatttgatatctgcctctgcctgaggagaaatctttgtgatcttaggagcagcagctgtctcaaactgggaataatccacttcttttccatgatatccgtcgatggcaccacggaagacttccagaagtccctgtccgccagaatccacaacacctgcttctttcaggactggaagcatctccggtgttctggcaagagtttcctctgcatgctgaaagattccgtcgaaaaaagcatccagatcttctgcagcatcggcaagctctgcggctctgtctgcagcagctctggctacagtaagaatggttccctcttttggtttcataactgctttgtatgcagtttcaacgcctcgctccatagctgcggcaatggcaggtgcatccagatctgtaagtttacgcacacctctggtaaatccacgcagaagctgtgacaggataacaccggaattacctctggctccacggagggaaccggaagaaattgcctttgccagggattccatatccggatctgtaagagcacctacttcagaagcagcagacatgatggtaagcgtcatattggttcccgtatctccatcaggtacaggaaacacattcagttcattaatccactctttcttcgcttccagattctttgctccggacagaaacattctggaaagtattttagcatctatggttttgttattcaccacaagttcctcctctaaaactaatctattgcacgcacgccctcaaccataatgttgatcttttcaatctccattcctgtaaaggcttcgactttatattttacattgttgacaagattgtccgcaatagtactgatattcacgccatatgctacgatgacatgaaaattcagccggatcttattatcatccgtgatcttaacactgataccatgtttcaggctgtcaatacgcaaaagcttgaccaggccatccttcatactgatagctgccattccgatgataccaaaacactctactgccacactgccggcataagtcgcaatgacatctgtatcaattacgatctgacccaatccggaatctatacgtccattcatatggttacctccattgtttcattcagattaaattatataaaaccattataaccttttttttataattacgcaatgatagagttcaacttgttttatcttatagaaaattaagctcatccactctattgaaggggaatccaggattgtgatggagcatgccgaccgatactatgaagccggtttttctttttcgtttatctacttataatccttttacaaacgcaactgcattttttatatcttcttcatctggatgcccttttgcaattccaccaaccagtttaaatggaccaaatgtgtcataacctttgcacccgaattttcctatcactttggaacgcttcttgtccaaaatctgctcaatagatttataattcgcacttccaccataagtacagatcagaaatacctttttgtcgtccggtagattcttctctgcaaatcccaatatcgactgatgaaattttgaaaaatagattcctgatgcaaacccaatcatatcataactgctcagatctgcatcgggttgttttacagcatcaatcaaatcgatctggcacgcttctgatacactttttactaatttttctgtatttccatgatgtaccgatgtatatacgattgcttttctcatttgttttcctttctgcctgctccatcaatcaggtcataactcatgtccaaaaagtccagtatctttgctttactgaccgaaccatccagtaaaatcgtgatccagtgctgcttgttcatatggtatccaggtaaaaatccatgcgtctgaataatcaaattcgtcatgtccggatcacactttacatccatgatatcaaccggatcttttccttctaatcccagttttgatttttcgacagtcatgatcactgcataccattttccgtttttatgtcgaagtactgcactgtctggcgatgtgctccataaatattctgggactgttccgtactgtttctgcacatatttaaagatttcttccgtcttcacaatctattcaactcctgacgtttctgatatcctacctataatcataccacattttcggattccgaactacctggtgaattcttttgtatttttccggttttcctatcctcatatgccagttcaacaagaatatgttctattcagattcaggaaagagaccaggccaaagaaaaaacgataaattaattcgcactgggtaattttctatgtttcaaattgatctaaaccatacacacaacgcttaattccaccatgatccgccctgttcccggaggtatggaatactttccttaaaactctttgcagaatttttgataaatttcctttttttgcttgcaaaagagcaattcatctgttaaaatggtgactgttgataaaaggaggtgctattcatggctaaatgtgcaatctgcgataaaggagctcatttcggaaacaatgtgagtcattcccatagaagatccaacaaaatgtggaaatctaacgttaaatccgtcagagtaaaaacaactgccggcggagcaaagaaaatgtatgtatgtacttcttgtttaagatccggaaaagttgaaagagcgtaagtaatatcgtatgcccccgtagaatgcgggggctgtttttttatcttcaagacaaataaatcacaagcgggaagcatgccaggtgcacacttcccgcttatctgcaaaacatatgatatccgcacagcagacatatgactgccattgcgattacaataaaattctctgtaataaggataccaagaaccatacccacaccaataaaaaacagcataaaaccagttagctttcccactcctgtctgctcatttcctgtttttttattacagtatatgcatgaaatctaaatggaatactactcttctttcccgtcagtatcctcagcattgcctgcacctggcgcaaaacggttcacaaaatccggcaccatatccagaaccttggtaaggccatcctgattttttacgtttacaagtttggtgcttccattctggatcacaagtactgcacagggagacatctttccggcaagacctccgccgccgttattcttcttgtccccttcaaaagctccggctcccacgccgaaggatacatcgaccagaggaaggataatggtatcacctacatgaatggcatcgccaaccactgtcttggccgatacaaaaccatccattcctttaaataatgaattcacggtatctttgaaattattctctttctccatgttttacctccttatgtctccatcggtggatgacgtattttatatttttattgaaataaagctctgctgctgttttgagaactacaattccataaatccttccctttaacaggatctctccctcaagaacattttcatcatcaaaaaggggcgctgcttcgatcttgtttttatgaaaaggaatcgtcattcctaatacagccaataccatacctgtaactgccggatcttcattgccaaatgtgatttttccggtgatccttgtcggaagcacatgataaatcagtttttttgcatttttccacagaaaggaaagagcctctctggttcggggatggtctaaaaattctttccaccagtttatcttatcacagaaattccggattgttaatgcaagactttgcatttttttcagaatccttttgggcattccaagaaaattctgtacgattcggaacagctttccaactgtcatttttatttttcccactatattcaaaattaaatctgcaatctttgtccgaagcttcttttcatcttccgatatttcttcggaaatcgatatcggctccattattaccttttccgaaatttcatttatatcttcaacagcatcttcctgaggctcagacatttgcagctctgcggtatcgttctgattttcgctttttgatgtcttttcatgacttccagaagcctctgtctgtttttttgcattttgatttccggagttggaaagagctcttggtttcttttttttacgaaacagatttttaaatttttccaaaggaatccctaacaaacatatttttgttttcagaacgccctgctcccagaatacctgtgcagaaattatatgaagcagccagctcacttcaccgaaagcatgtatttcccgaagactatccgtacggtctttttttaaattccctctgtatctgattggacaaaataaaagaagcagcaggatcagaaagatcagcccgatcagaatccccagaaggatcaatatccattttattatcagccataatatatgcagcattggttcacctgtttttcagatattcttttattttaaaatttccagtttcggtataaacctgttcgatcatatcctgtaccatctgtatagcaccggattttcctctagccattccaacgatcaaaggacaggtggctctggcgcttcgctgtacaagcatgcctgcgggaagaatttccaaaatatttccgggattatcagacaaagtaacaacgtagatatccggcacgaatttaccagcagtgatcctggttcttattctagtaggattttttacatcatttcctatgtaatagtttttcatccatttcagcaatctgccctcacctccgttataatgccaaacagggctgcgtatgtacacagccctgtcctgttgttaaaaatacttctgctgtttcgcccagacgccttcacttcgcatttccagatactcctgataggcctgttccacgatatgcttctcgttggaaaaacggagaagatgatagatctcatgaaacttatagtatccggaatctacaaaatattcctctcgctggggtttgctatgataattatcagctatcatgagataccagtgtacctctttcattaccacatcctccggaacggtgaaattatactggctcttaccgatatatttcacgatagaggcccgaacacctgcttcttccattacttcacgtaaagcagtctgttcaaaagtctctcctttttctacagttcctttgggaagcacccatccttcataacggttcctgtaggatttatacaatgccagaatcttaccccgatgaattaccacaccgccacagcttgttgcttctatcatattgcaatcctcctgtaatgcgtgtgtcttttgcactggctatagtatacctcttttttaccttataggcaaggggcaagaagcagatactgttctcaatttaatcgaaataatatgcatcaaaaacatctgccgcaatgggaactgccgcttcacttccggttccgccgttttccacgatcactgcaatggcgatatccgggtcatctacattagaataacccacaaaccaggaatgactggagccattttcatcaaactccgcagaaccggtctttccggcaacagtatatcctcgtccgttcaatgcggaagccgtaccgttttcaactacatttttcattagttttccaaggatattggcttcatttcttgtcatcagacgtttgtattctgttttttctgtttccctgaccgtatcaccggaattattcacgatcttatcgatcatagttggcttcatcagtacaccatcattggcgatggcacttgtgatcaatgccatatgcatcggagaaacaagagtgttaccctggccgatcgaggtctgcatcacaagtgcgttcggagaatcattatccagggtaaaacggctggttttataggaattcagcggaagagccttattaaagagcagatcctctgcagtacttttcagagtacctcctcccagaccaagtcccatatctgcaaatgcacagttacaggaatgtgcaaatgcggaataaaaatcctcctgtccatgtactgcaccattgtaacactggatcgtgtggtcatccactgtgatacttccctgacacagataggaatatccctccagtgatcccttttgcctgaaataatccagtgccgtgacaatcttaaatgttgatcccggaggataagctccattggttgcacggtttaaaaggctgctgttactttcatcattaacaagggtatcccagttctgtgcgatcgtgttcggatcaaaatccggtttgctcaccatagccaggatacgtccggtggatggttccagtacaactaccgctcctctgcggtctcccagagaattgtatgccgttgtctgaagatctgcattcagactggagatcacggtatcaccctgattcttttttcccaggaattcatttttcatctgttccagaaaaaatgaatgggaagtgagaagctggaaatttgcttccgattccaaaccactcttaccattggtatcatatcctactgcatgtgcaaaaatattggaaaacggatacgttctctcttctgttccatcttcatacacattggtctgtgccaggacctcaccatccgaagactggatacttccacgtactacacggtccgaaaatgtatcctgacgggtgttgtacgggctgttgataaaatcttcgctttttatggcgtcaaaatagaccagatatccgatcaaactgacaaagatcaatataaagaaggccgatacaaaagttaaaggccggttcttttttctacggagtctggcgatttctctttctctcaggcgttgctctctttcctcttctttcaatcgtttcttttcgctgcgtttcaatttgttcgtcctcatcttccctcagaatatacagtccctgaatgatcgcaagcatcaggatggtacacatgacagaactgcctccgtaactcaccagcggaagtgtaactcctgtcattggaataaacttggttgcaccgccaatggtcagaaatacctgaaaagcatattccgttccgagccccagtgcgatcagtttataaaacggattcctgatctttagtgcaatagtaacgatcatcagaaaaaagcttgtgcatacaagaatcaggcagatggcaaaaatgccacccagttcctcgcaaatagcactgaagataaaatcattttttacgaccgggatcttctctggagagccctgacaaagtcccattccaaaccagcctccggttccgatcgcaaacagagactgcacgatctgataaccttcattttgatagacagccatcggatccttccaggcactgactcgctgacggacatgtccaaaaagatgatatgcgatcaccgaaccaacgcatcctccgccaagtcccaaaaataaatagctcggatttctggttgccacatagatcagtacaaggtaggtgacaaaaaagattactgcactacccagatccctggaaagaaccaggatccctacatggatcactgcaacgatcgtagccagtactactttgcgaaaatccaccttggtacacagaagtgatgccataaaaaatacgaaggttatcttgatcacctcggaaggctggattcccataagagaaagctttgcaccgtagcttgtgcttgccagaacaagaactgccgccagaagtacaataccaattccggcataagcccatgtaagatcctttaaaaatttcatttttcgtatcattaccggtatcaccagtgatactgcactacctgcggccacgatcagaagctgcttagttgcagacggaagtgaaagccggcagagcatgataaatcctacgctcaggagcatacacatattatttaaaagaagcagcgatgcattctgataaataattcgataaaggatctggatcgctgcaaaaaagatcatcatttcgatatagaacaggatgaccctgaaatccatgctttttaaatagatcacaagaaatgctgtaaaatcaataaaaaagatcatggtcagctgctgatggagcagttctctcttttcttcctcatcctgccgccacaccatataaaaacaatgaaaggtatagacgatcatcaatgtgaggatcacatacttagataattctgtaattacattaatcatacacttttactcggctcctcttttaaaatggccttttgtatacctgcgtccggaaggttttccgttttcctgataaaccgtccggaattctttcaggatcgcttttgctttctctggctcttcgatcgtaaatgccagtcgcaaagagtgaaggttcagtttttttacctgatctttttcacccggaagtccgtaaggaatgctattataaatgatattataacagtattttgctttttcggagatgttttttccccatggatcacaactgcattttaccggaaattcactgttatagcggtctttcagataagccgtctcatattttcctgtacatccgaaaagattcttccttacacactgcgcggaaagcatcagtgggatataaccatataaaagcagctccgaagaagtattatctctgtgtttcagttcaccctcattcaactcaagggggactgtatttcgaagaactccctcttcccgccagaaatcaacactctgatcattccaggtatacatggatgcatccaggatacatttttcgccatatcccatttttttcagtacggcgtaagattccaggtttcttaccagaaaacccttcataccctgctccaaccatttttgagctgatcgaagccacttttcggggatttctccgcgatggatatgtggagtagaaagatataattcactgcttgcagcaagttccggtgaaaaatatttttccatagtatcaaaaggaaaataaaaacctgtaatccccggttcgttcaaaagtacttccgcagtatccaaacgttcacaggatacatacacaggcaggctgtctgttacccttctgtgacaggcagcctgatccttagatttcgtcggctgcttcgtaacctgtgctctcttctgacatccgatcagtgcttcccgcagctgactcagagcagctcttcgtacttcattgagaactttaaccggaacaaaaatccttccatttatttcaatgttcagatcctcccactgaaaatctgtatttcccagtttctccatctgctgacggatcctctgttcttccattggctgatttttagcaaactgtacctcaccgcccatagcagttactgtctggcccttgcaggttatttccagtataacaggactttcaggagaaagtattaaattcccatgaattttttcttttatttttctgatctccggctggatattaccggattttttttcattggcaaaagccatcatttccggcccgcgatacatatcatagtatcctttgcaggatcctccccgactgaaaagctcaagaagatacttccggtctttttcctgaacgtgatattcttttccacttaaatacatatccagatattttcgatatactgccgtgacgcccgctgtgtacgccggctgtttcatacgcccttcgatcttcagagacataacacccgcctccaggatatccggaagaatatccagagtgcagatatctttcaggcttaatgcacaaaaatccttgtctcctttatattttctgtgatccatggttacactgtaaggaagcctgcatggctgtgcacagcggccacggtttccgcttcttccaccgaaaatactgctcatcagacactggccggaatagctgtaacagagagctccatggataaaagtctctatttccagaggacttgccttatgcatggcagatatctcttccagggaaagctctctggccggaaccacacgagttgctcccttttcctccaaaaatcgcattccctccggtccggttactgtcatctgtgtgcttgcatgaatatccagatccgggaaattccggcgtataaaagaaaatactcccagatcctgtacgatcaccgcatccagacctgcctcataatatggaagcagatattcaaacagctgatcatccagttcacggttcttcaaaagtgtattcacagtaagatataatttacggttatggatatgtgcggtctcaatggcagtgatcagctcttcctgggtgaagttctgcgcataagctcttgctccaaaagccggtcctcctacatataccgcatcagccccggcaccaatagctgcctcaaagctttcataagaacctgccggcgagagcagttctgttatcatatttttcaaagtattacctcatctcccatctgttaatcaatccgatgaccataaaacaaaagaggattaccgaagcaatcccccatccttatttaagcagttcatcaagttctttctccagttccttcaccttaccgtccagaagattcttctgttcctgagcttcctgttctgccttcttcgcctcttcaatctgcattttcaaagaaatcagttcatgtttcagatcatacatctcctggtctttctgctgcagatcctgttcaaaaatctccgcctgcttctttgccttaaaataatcatctgtaatattcagactgagcagtgtatgtttggtctccatggcctgtctggagtatcccggcatctgactcagctcactgatcttattattcatataggctgcaaccttctgaaaatattcctcggactcatacccgcccagagtaatgatctttccatcgataacaacctgtgctgtattctttaccgccattcgtaaagcctcctgaatttatctgttactggtaatttcctcaataacattcctctgcattgccggtcttacaacccacaatttcttttattataactgattcccgcaaaaatgtatagaagtttttctattattttgtcgattacaatattttccttaaagatgcaaatgtttttctcaattatgagtgttggctttcatgtgttcgatcacccttttccaggaatcaataccgcaggttccacttacctttacgcctgtgtttttctggaaaactttcagagatgcttctgtatcgtctccgaaatggccatccacagtaacaccaagtacagactgcagcacagaaactgcaacgccggaattccctttccggatgatcggaagctgggtctcaaattttcctgtcagaactactgccttttctgaagtctgtacaggatacactgcttttccgttccaatcatagatggtgtagccctgtttccactctttctttgcattctcaaggctcttgtatgctccaatctggctcttgctgtcagcccaggactttcttgtgcgataatacttatctaccgttggcgtggtggtctcagccccgatcagttgcttgaaccggttccagtcaccttttgcacggatcgctgacgggcagttctttgcacatacatcataatgctgcacaactctgtctgccgagattcccagctgtttcataagctgtttgcacacctggactgtattctggaaagctttctcatagttatagcccgcctggacgcacatctcgattcctactgaatttctattgttgacagtaccgaacagccgaccgccgtagttgacgcccacgtgccatgctccacggttgtacggaagcgcctgatacgcctctgtgtcatccacatatacatgtgcagaatagcctttaaagtttccatcatgttgagccttagcatgtgctttcgcatttgcacccttggcatagttatctgtgttgtgaattacgatatatgccggtttatgacctgcatagctgttgttgttactgataagacttgtgttgatattcatggttgtactctccttttctgtttttgatgtcttatttgatgccttaatagataatatgccattcaaaatgctgatgatcttctgaccataattcctgccggatacctgagcttttcccataatctttaacatatgtttcctccaataaaaaaagacgattactcgcctcctaaaaatacttgaattatttttttcgaaatggtatattgataatacaaaggaacaaccgcccacaaggggttgaactcagtgaatagcgaaatagaaattccaccctacactcagccaaagttttggggtggtttttctatgtagaaaattacttacaaaacgtcaaaacgaacgtaagcaatgccagaatgaacataccaaaagccatgaggtctttgaaatcaaaatgattcttgtccatcagcaccacctccattctatgtagaatagaggtcagccaccctgcaacacgattgctccgtgttctatattatcatatcgtcctttgatgttcaacgaatttcacaaagggatcactcgccctctgaatctttgtatttcgtcctgtcccagataccttttactttttcccaaccgccggtcgcaaccaaatacactacaaacgccgcaataatcgatgcgaaaatataataccaggtgacagctgtcttataatacgtgcacaggactgccagtgccaccggacacaggatcagtgatgtgaccagtgctacaatacttgtcgggatcttattaagtcccgggagctctttgatcacctgcacaataatcgataccaggaacgccagcaccccgatcagcgccagaccatatgttacatactgcatcattacatttacattcatgttcattctccttttctttccagatcttctattctatgacatgagcaaatgattgtttccatgtagtgtttcccttctccgactgttgcaccggcgcaattacagtttaaagcacatgttttgaaatttcttataagcatcaaagtataactcgtgcttatctccgttatatgtcagctcataatacattccatccggcacagtcgtgctcagaagtgctttactgttctgtaatgtcttacaactccataccacgtacacatactgtactgtgatctgttttccatcgatcttatccatgtgtgaattggtatattcagctacttttactttgcaaagtcttaaaaattcttcatttcccattccttacctcctacacatggtcaattctcggaattccatactcaaccgcacgctcatgttcgatcttgcatcctcttgctttctgccagtcttttgcaaaataggcgatatcggcatcagataaaaactccagggactttccaatgaaccacagaggttttgctcctaccggtgctgactggaagaaagaatcaataacctctacaggttctctcaacaactcttctgccgctttgattgccacctttcgctctgcaagaatctcctcgtctgctttgccactcattggctgactgataaataatttcttcatttcttgtcctctctttcttaaaaaagtgtataaaaataccacctgtcattttctgactggtggataattattgtttattttaagtcttgcattcttgtgtatattatcgtaaaatacacataagatatcttaataagaaccattcgcagtacccatgatcttttagatcgtacagctgaatggttcttattttttatttctttgataaacaccaattatttttctatccttgtacaatacgatctcttccaaaaaaggagagatgtgttgatctgaacagattattgacctgctccattatttcgccctctttcagcgggcaatccgttatatcaaaaataaagtttcctgcctggcgctttttcttttttaccgcattatacagaacgttttttcacctgtgctaatagtcttcaattcagattctctggtaactcagttaccgagtaattcacttttttatgacctttactttgtcgataaatcaggacgaggatatccaagatgggtatatgccagcacggaagccattcttccacgtggagttctgttaaggaaacctgtctgcaaaagatagggttcatacacgtcttccagtgttccggagtcttctccgatcgatgcggcaagtgtttcaagccccacggggccgccctgaaaattcaggatcaaggtctggagaatgcggcggtctgttttatcaaggccatactgatctacttccagaagatccaatgcgaagcaggcaacatcgtaggtgatcacaccattatacttcacctgggcgaaatcacgtactctcttcagaagacggttggccagacggggggttcctctggaacgcttggcgatctcggcagctccattgggttcgatttccacgccaagcacctgagcggaacgtagaatgatcgtcgtcagttcttttttatcataaaactccagtctctgtgttacgccaaaacgatcacgaagcggcgcggaaagaagacctgccctcgttgttgcacctaccaatgtaaacttcggaagatccagacgaatggaacgggcggatgctcccttgccgatcatgatatcgatagcaaaatcttccattgccgggtaaagaacctcttctacctgtcgattcagtctgtgtatctcatctacaaacagcacatctccttcctgaaggttgttcaggatcgcagccatttcgcctggcttttcaatcgcaggacctgatgttaccttcatatgtgttcccatctcattggcaatgatcgcggaaagtgtagtctttcccagccccggaggtccataaaacagcacatgatccagtgaatcatgacgctgctttgctgcttcgatataaattttcagggtatcttttgttttctgttgaccaatatactcatccagactctgaggccttaaatttccctccagggaaaaatcctcttctgtaacatctgttgtaatgatcctgttctccatttgctatgctccgttctatttcatttcagtgcgagcatgtttgctcttactcacggcggtgacatgctcccaccacttaaatcttacgattttgaagtgggggcttcctgctcgattaccctttagagcaaagctaaaacaggctatccccgcgtgtcccgcggttttgttttttatgtttatccggttacggatttttttcttgtgccgtcaggcacattctttatagattctttttccttcttcacggatattgactgctgcattcacatcccggtccatcctatttccacatccacaaacatacattctatccgacaatgccaattcctttttcttatgtccgcatacactgcagatcttgctggatgcaaaataacggtctacttttataagatgttttccgcattcttccagcttgtatcccagcatgaacagaaactgcccgtacccgttatcctgcacacctttcccaaggtgcagtcctccggacattcccttcagattcagatcttccacacatactgcatcatatctttccgcaagctccctactgagcttatgctggaaatcttttctctggttctttatcttttcatgacataaagctaccctttttttctgtttctgatagttccggcttcctttttcacagtgggagagctttctctgttctcttgcaagttttttctctgcttttctgtaaaacatagggtacccggctctttctcctgtagaaaatacacacattccctgcatggcaaaatcgatcccaagaaatctctctgccggtcttttttccactgtttggttctcacagcagaacaaaaggctggcaaaatatttcccggatggctcacggctcacagttacagacttcagtttccagtctgatggaatctgacggtgaagttttatccttatgacggacatctttggaagtttcagatgggtatcctgcaaaaggatatttccgtttagtgcattggtcgtatatgaatttcttgcatgcttctttgatttataacgtggaaatccgcaggctggttcccgaaaaaacttccggaacgcactttccagatgcagctgcgcattcgccagggcaagggaatccacctccttcagccatggatattcctttttatatccggccggtgtgttccggagcatctttttttctttctggtaatagctgatcttatctgcaagcatctggttatagataaagcggctgcagccgattgtttgctctatctgaactctctgctctttatttggatagatccttatttttacggcgcggttcattcttctcaccctggctttctatatactgccgtatcgtttcaatcgttgctccgcctgcactgagcagacagaagatctgactccagaatgcatctttcatggtctaactccattatatttatcatcctttttcttatatcgacggatatgtatttatgaactaattgttctttttcagtatactacatcagggaaaggagaacaagtgtttcttttatactatagagatttttttaagcagatatgctcagatgtgcaattcatctcaccatctgaagaggtgggagaattcttgctacatttgttaaaaatttttcagtgcagcccgaagaattgcttctacatcatctgccggcacatcttccggtacctttcgtactgcacgaagggcatctgcagaactgtatcctaatgcgacaagcgcctccaccgcttcctgacgactatccctcagatcagatgctccctcagctgcttcttcctgctgatgcgccagtttcatctcaaaagcatcttccagcttcagcttgtctttcagctccaggatcattttctgggctgtctttttcccgattccaggggccttggagattgtttttacatcatcggaaagcactgcaaaacgaagctcgtctgcactgatcccggaaaggatacccagagcgcctttaggtccgactccgttgacaccgatcagaagcttgaacatgccaagatcatccttcgaaaaaaaaccatatagctgtagaatatcctcccgcacatagagaaaggtatggatcttcttttcatcgcctatccgtgctttcccaagatcctgtcctgtcatataaatctcataaccaattccgccattttccacaaccagacaattttcaccgatatctgctacggtaccttttacaaaagaaatcaaatctcaaggctccttccctgaaacagctgaacatctgtttcccatatgaacgcaatagtaacataattttcaaaaaaaatcaacccggaatacaatctccgggttgatcctgtatacaagcctgtgattcctctcgctgttttctatcactgattaaggaaatcctgatcctcaaaataattgatccgcatagaagaacggacatcatgaagcgttgcggcagctttttctctggcaacctctgtaccggctttcaggatatcgaacacatcttcggttcgctgctcccacattttccttctttcacggatcggtccaagctctgcctgcataacattattcaggaacttcttgactttcacatcaccaaggccacctctctgatagtgagccttaagttcatccagattctgatactctggcagaaattcagcaaaatgttccgggcggctgaaggcatctagatagataaataccggatttccctctacacgaccaggatcctgaacacgaagatggttcggatctgtaaacatggacatgatctttttcttcacaacatcttcttcatcagacagatagatgcagtttccgagagacttactcatcttagcctttccgtcaattcccggaagacgtaagcatgctttattggaagaaagaacaatttccggatctgtcagcgtatcaccgtaaacggtattgaatttatggacgatctccttgcactgctcaagcatcggaagctgatcttcacctaccggtacatgtgttgcacggaaagcagtaatatcagcagcctgactgatcggatagcagaaaaagcctaccgggatgctagcttcaaaattacgcatcttaatctcggatttaacggtaggattacgctgtactcgcgctaccgtaaccagattcatataataaaaggtaagttctgtcaactccggaaccatggactggataaaaatattggatttctccggatcaagcccgcatgccagatagtccagagcaacctgaagaatgttatgacgtactttctccggatgctctgcattatctgtaagtgcctgggcatctgcaatcataatataaatctcatcatataagccggaattctgcagcttcacacgctctgccagagatccaacataatgccctacatgaaggcgccccgtcgggcggtcgccagttaaaataatcttactcatgaatttcgttctccttgaagtatactgaatatttatatcctattatagccccttgaaattcaccggtcaaatatttttaaccggaaactgcaatttttcattgaaatataaccaaaaatttgtatgtatttattttatttatgcattatcgggcacaacatgctttattccaaaaaagaactgccacgtcactcggaaaacttccgtgacaggcagttcttttttgttttacagaatcacatgtcttgggcaaacttccttacatttaccgcagcctgtacacttatcgtaatcgatgtgcgcacagaaatcggtaactgtgatcgcctcggacggacagttcttctcacattttttacagccgatacagccaagctcgcaggcagctgtaactgccttaccttttgcgtgggagctgcaggctacacgtgtctgtttgtcatatggtaccagctcgatcaggtgacgtggacatttggcaacacatttgccacaggctttacatgcttcctgatctacgaccgcaataccattcactatatggatcgcatcaaatggacatgcctttacacagcttccgaagcccatacatccaaatgtacagttttttgcaccgctgccagggatgaaagccatcatctcgcagtcttccacacctgtgtactcatatttcacagtcgtcttatcacaggttcccgcacattttacaaaagcaacctgacgtgcggtttcttttacttcctgtcccatgatcgcgccaatcttggctgcaacaggagcaccgccaaccggacactgatctacaggagcttctccctttgcaattgcggcagcgagtccggaacatcccggatatccacaaccaccacagttatttcctggaagaacgccgagaatggcttcttccttttcatctaccttaacggttaatttcttgtctgcaagtccgaggaagataccaatgaataaaccagtaccgccgacaatgactgcagccataataattcctgttatactcatgctcttcttcctcctatacgattccggagaatccaaagaatgcaatagccatcagtgctgccgtaagcagaacgatcggcataccctggaaggattccggaatatcgttgtattccattttttcacggattcccgcaagtaatacaattgcgatcaggtaacctacacctgtggcaaatccgttgacaacactttcaagaatgctgtattcatatttaacattgttcagtgctacaccaagaactgcacagtttgttgtgatcagaggaaggtatacaccaagtgccttgtaaagggatggtacaaatttcttgagaaacatttctacgatctgtaccagtgccgcgataaccaggataaatacgatcgttttcagatactcaaaatgggtcggtaccaggataaatttataaagcagtcctgcaacaaaagatgcaatagtaataacgaatacaaccgcaccacccatgccggctgcagtttctgtcttcttggatactccaaggaaagaacagattcccaggaactgactcaatacaacgttactgcaaagcgcagaaccaattgcgatcaacatcaagcttgccattttctattccccctttttattctttgtcggaaggacatccgccgcaggtcgcacaattggagccacagccggactggatcttggaaacatctttgcccttctttgccatgttgatctttactttgttctggatcgctgcaagtccggcaagaaccagaaatgctccaggtgcaaggataaagatagtgatcggggtatagccggcagcaccggtagctgcatcagcaaccggaatgatctgtgctccgaaagcctttccagaaccaaggatctctcttacaagaccaatggcaaccaggcccactgtaaagccaagacccattccaagtccgtcaaagatagacggaaggacagggttcttggaagcataactctctgcacgtcccagaatgatacagttaacaacgatcagtggaatgtaaattccaagtgactcataaagagaaggagtaaagccttccatcagaaactgtacgatagttacaaaagatgctacaactacgataaaggccggcattctgacggagtccggaatagccttacgtagcatggagatgagcatgtttgacataaccagaactacggttgtggaaagtcccataccaataccattgatcgcagaagtcgttaccgcaagggtaggacacataccaagcatcaggacgaaaatcggattttcggttataatgccgttttttaatctttcaccacaattattcatattcaactaccctcctaaaatgcgtttttgcaatagccgatagctgtattgactgcaccggtaaaagctctggatgtgatggtcgcaccactgatagcatcaataggctcaccttcgccgccgtccttggatacatagaatttatcggtattctttccaacatactgttcctggaacttcgcttctgtagcacgcattccaagtccggcagtctcactgatggaaagaatggaaacgccgctgacggtaccgtcttttgttacaccaactgtgatctggatatcaccgccgtaaccctctttatcggttacagttactacatagccttcatctgctgcttcacagacttcatctacgattgctttgattccaagatctgaagctgttttatctgctgcttccttgtctacatctacagctttaaaatcttccaggcttacatcactgaatacagtctgccatgcttctttttttgcctgttcctcggttcttgcaatgggttctttggtaacttcgtaaaccagtccaaggccaaggccggcaactactgtaatgatcgtaaggatcaatgtatttctgataatcttacccattatttcttgcctccttttccaaaagcaaccggttttgttactttttcaataagcggaaccagaagattgcagaaaatgatcgcataggaaacaccctctgcggaaccaccaaagagacggaatactgctgtcacgataccgaggcagcagccatataccagctgacctttcggagtgatcggcgttgtcacataatcggttgccataaaccaggctccaagcatcagacctcctccaaagatatggctgaaaagatagtttacatcaaagcctttgcctgttcccagcatatagaaaatgacaaatactgcaaaacttccaatatatgtaagaggtaccttcagatcgatgatcttaaatgcgagaaggatcactgcaccgatgaggatcgccagggcagaagtctcaccgatggtaccctggatattaccaaggaacagattctttacaggaatagaagtcccctcaatgaatccctggcttttaagcgctgccagaggtgttgcctgtgtaaccgcatctacaacagcatgggagcttttggaaactgcaaagttggtcatttttccggcaaaagagatcataaggaaacatcttcctgcaagagccgggttcataaagttctgtccaagtccaccgaacagctgttttacaacaatgatcgcaaaagcactgccaaggatcggcatccagatcgggatctggggcggcatgttcagtgcaagcagaagtcctgttacaactgcactgaaatcagtagttgtattctttttatgcatcagtcggtcatacagccattcaaaaaacacactggatgcaaccgtcgccagcactacaaggagtgcatgcactccaaagttccagataccgaaaagtgttgtcggcagaagtgcgatcactaccagctgcataatacggctggtggtcattttatccctgatatggggattagatgatacgttatacatttgttccattgttattcctccccctatttctttttcttgcgctctgcaagaaccatttttctcatagatttaatactctgagtcagaggtcgtttggccggacagatgtaactgcagcagccgcactcgcagcattccataccatccattttttcgaagcctgccatatcaccgtgttctgcaagagttgcaaggcgggccggaaccacatggcccggacagacgcttacacaacgtccgcaattgatacatgcagtctggatctgcttcgcctcggaaactgcgtcacgctccaggaaaagcagggaagaagttgtcttcgtacatggaatatgaagatcatacagcgcaaatcccatcatcggtccgccggagattgcttttgcgatcttttccttcagtccgcctgcagcatctaccagttcagacagatctgttcctgtaagaacggaaaagttcttcggtgtacggataccatctccggtaaccgttacattacggctgataaccggctgtccaaggatcactgccttataaacagaagtgacggtctctacgttatcaaccacgcatcctacgtctgccggaagcatggtggaattgatctctctgcctgttaccgcatagatcagtgtacgctcaccaccctgagggtatttggtcttaagctcttttacttccatacgctctttgcctttgatggcttctttcatcctggcaatacaatccggtttgttgtcctcgatacagatacatcccactgccttcgggaaagctttcaggattacttccagaccaccaacaatgctttccggttcttccatcatccttcggtagtcactggtgatataaggctcacattccgcaccgttgaccaggatatggtcgatcttgtcgggttcctttggtgagagctttacatgtgtcgggaaacctgcaccaccctgaccaacaactccgccttcctgaatccttttcaggatatcctccttggaaagatccgaaagctttgcaggtgcatattccacagattcgtacagaccgtcattctcaatgatgatcgcatcacccatggcgcctactgcggtcagacgtttctcgattccctttacggttcctgatacagacgagtgtatcggtgcggaaacaaatcctcctgcttctgcgattttctgtcctgcaagcacatgatcacctttttttacgatcggcttggccggagctccgatgtgctgagaaacaagaattgccagatctcccttcggcagatacttctcgacaggacagttttttgacaaatctttgccgtcataaggatggataccacccctgaaggttaaaaatgccatagatctcatctcctcctttatttttgcaagtacatgtacatggtatttctgcgttgcgcatatactcttttttaaagttgattctgtgtttctgattttccttttcttatttcatccaagacaaacaagatctatttcgctcccataaatcatttcgcgaaacattaccagcgaacagtaacaaagtagcttctgctttgagcaggatatgtatgaaagattgaatccagacacgatcctgtgatatacttcagtagaagatattcaccagctcataaaaaagctgtaaatgaataactaatttatgaagcgataatagtcattttttcactgtcaatccctacataaatccagtaccatttcctgttttttatcatcaactctactaataactataactcatttcactttaaattgcactattgaaaagcaatttttttgtgtataatcagatacaatccataaaggagaaaattaacatgatcgttaaaaaaatgccgattttacaagggtttccagactttaagactgttaaaaaattgactaaaaaccatagattttcagagcgctttgtaccgcttttctatgatattgaaactacaggactatcacgaaattccacttttctgtatctgatcggtgctgtagcctacgaagaaaacaactggcagatgtaccagtggatgattgaaaacgaagaggaagaatctgaacttctgaaaacattttctgaattccttcaggatttttcatgtacgatccaatataacggtgacagctttgaccagccttatctggatgcacgatatcagatccacggactctcttccccttttgcaaagctgccttctctggacctttaccgggaactaaagccgctcaagggacttttgaagctttcacggatgaatcagccttctatggaatcatttctcggtatcactgaacggaactactgtgatggaggtgcctgcatccgtctttacaaacaattcgcttccggaaagaaaccagaagcggcagagatcgttatgggacataaccgggaagatcttcttggacttggaaaaattttctccatgctatcctatcttgctcttttcaatgaagattacgaagcactaaattgtgaaattcaagacgatcaattggcctttaccattaaaactaattacgatctgcctgttaaattttcaaatcatagtgaagaaatctacataattggacagaataactgtgtccgtcttcttgtaaagtctcaaaatggacgtttaaagcaatactactccaattataaggattacgattacatcccttccgaagacactgcaatacccaaaaccttaagtgcctgcatggataaaaagctccgaagacctgccaaaagggaaacctgttacacctggtttcctgtaacagaagcttttctgcatgatcctttaaaacagaaaacctatctgaaacactgcctgccatattatctttctgttcttaaataatatctctgttacgcaattccaatcaaaaaaaggccgtcacaataaatgtgacggcctctgaaattcaaaatattcatctgctgtacagcttctgagaaattactcctctgtctgctctgcagaattatcctcgagtgctttcatgctgaggctgatctttctgtcttcgccattgaaatcaacaaccttagcctcgatctcctgaccgatggaaagtacatcagatggtttcgcaacgtgctctctggagatctgagatacatgaagaagagcatctactccaggtgcaagctcaacaaatgcaccgaaatctgtcatacgtgcaactttgccctttactacgtttcctactgcgaagtcctcagcagctgtaagccatgggttctcctccgggaatttaagggaaagtgcgatcttgtctccgttgatatctttgataagaactgtaactttatcacctacgttgaataccttcttcgggttctctactctgccccaggacatctcagagatgtgaagaagtccgtctgctccgccgaggtcaatgaatgcaccgaaatctgtaacattcttaacaacaccctcaactttatcgcctacgttgatcttagcaagaagctctttctgtttctcagctttctcagcaagaagaagctgtttgcggttaccgatgatacggcgtcttcttgggttgaactctgtgataacgaactcgatctcctgatctgcatatttggaaagatctttctcatatgtgtcagatacaaggcttgcaggaatgaatactcttgcttcctcaacattgacacaaagaccaccgtcaagtacctgtgttacaggagccttcagaacctcctggttctcaaatgcctcctcaagacgtttgttgcctttctctgctgcaagacgtttgtaggtaagtgtaacctgtccctctccgtcgtttactttgagaacctttgcttccatggtatcgccaggtttaacaacgtctgtaagcacaacgcttgaatcgtttgtgtactcgttctttgtgatgataccgtctgctttatagccgatattcaggatgatctcatcatctttaacatcgatgacggtaccctgtacgatctctccatttctgattgtttttacggaatcttccagcatctgttcaaaacttaactctgacatgttcttgaacctcctcaataattttctttggggtggaagcccctgctgtaatacctacacaactactgcattggaacatttcagaatccaagtctacaggtgtttgtatatagtaagtatttccacattcctttttacatatttcaaacagcttttgagtattggagctatgtcggccacctacgaccagcatagtgtctacctctccggctatcgctttagcttctttctgccgttcttcggtagcattacaaatagtgtttaaaatatttaaaatatttaaaacattattatcataactctttttgcggagaatttcaactaattcttgaaatttgttgtaattaaatgtcgtctgggacactacacatacttctttttccggagaaatattgaatttttcagcatcctcagcatttctgaccactgtatatggtccctgacaccatccgcagatcccctggacttccggatggtccggatcaccgatgatcacaatatgggcacctctggagctttctttctcaacgatcttgtggatcttcagcacaaaaggacaggtaacatctacatatccgagaccatattttttgatcgtgttataaaccctgcggcccactccgtgggagcggatcacaacagtgccgcccttcaggctgccaagatcctcctcacagatcacagccacaccttttttttcgagatctgagacaacctcctcattatggatgatcgggcccagtgtataaatcggtgctgcatcggaaccgatcagctcataaacacggtcaactgctctttgtacgccgaaacagaagccggcagtttctgcaacttttacgttcatccattcaccctttttctgtatacggaaaggatactctcaaccacttcgtcaattcccatctcagatgaatcaacaagaacagcatcctctgcttttttaagcggagaaaccgcgcggttcatatctctctcatctctgtcaacgatatctttcatgatctcatccatatcgcaggcttcccccttctctgtaagctccaggtatcgtctgctggcacgggtctttgcacttgcagtcagaaagatctttacttccgcattgggaagaatggtggttccgatatctcttccatccataactacattattctcgactgcaagattgcgctgtagcttcagaagatgtgcacgcacctccggatttgcagagcttacagatgccatatttcctacctcttccttacggaggaacgcagttacgttctttccgttaaggatcacctgctgctcaccgttctcataacggatagagatatccgcatcgtgacaggcttcagagattttttcgtcaccgctgatccctttttccagaagataaagtgccatggcacgatacattgcccctgtatctacataaataaaggacagctcctttgccactttttttgcaattgtgctttttcctgcacctgctggtccgtcaattgcaatattaatacccataatcgttgctccttcctcttttctgttattctatcgcctgagctgccgcatacgctgtagaccatgcgatctgaagattatagccaccggtcactgcatccagatccagtacttcacctgtaaaatacagattttttatttttttggattccattgtggatggctgtatctcttttactgacacaccgcctcttgtgatgatcgcttccttaaactctcccattcccgtgatcgtaaacggaaaagccttgatcagacggccaaaagcctgacgctcttccctggagatctcatgtaccggtttttccccggggataccgccaatttcgatcatgatcggagtcagagaagacggaaaaagaacaccgatcacatttttaaattgcttgttatgatttgcatcaaattcacgcaggatccgggcgtcaagctgttctgcatcaagcgccggcttcagatccaggaaagcctccaaaggctccttttccaactttttaccgatctgggcactggcggaaaggatcagcggtcctgtcactccgaaatgagtaaacatcatctcgccgaaatctttatagagaacttttttgccggattttactgtaagctccacattccgaagggaaaggccctgaagtttggaaacataatcttcttttgccaccagtggtaccagtgatggtgactgggaaacaactttatgtcccgtttcagcagcaaaacgatatccatctcctgtggaacctgtggacgggtaggaaagccctcctgtggcaactaccacagtatccgcttcaaaaaaggtaccgtccgaaagtaatacaccggtaactttttcatcctgtgtacaaacttcctttacctctgtatgaagatggatctgcactccggcttttttcagttcccgctcaagcgcacggataatatctgatgaatgatccgataccggaaaaacccggtttccacgctctgttttcagtggcactcctgcctcctcaaaaaattccatcacatctctgcttccataggtgtagaaagcactgtaaagaaatttgcggtttgacatcactgccgaaaaaagttcttcggtatcggaatcattggtgacgttgcatcgtccctttccggtgatgaaaagcttttttccgagtttctcatttttttccagtatgtgaacctggtgtcctctgcgcgcagcatatacaccgcagagcattccggcggcaccgccgcctatgatcgcaactttggacattacctgttatcctgccttttttatcttttttatgcacaaaggagcctgcatacagcaagctccttttcctgttttgaaatgcatctgcatttctatgtgtgctttataccgggtatgcgccgttcttggtatctgctacagtctcatcaacttttgtcttctgagcctggcgatatttaaagaagtccatggcaacctgcgggaacagtgcatatgtgagaacatcctcatcctgctccttgtactgtgccatctcgctctcaagcttatcaagctcatcctccagaagatctgccggacggcatgtgatcggttcaatatctccgatacattttttctgtacttccggattgaacggtctggctgttgcgccatacttaccacttaacacgtcttttgtctcttttgtgacaaccttgtaacgctcgcccatgatcacgttaaatacagcctgtgtaccaacgatctgagaggacggtgtaacaagcggtggctcaccaaggtctttacgtacacgcggaacttcctcaagtacttcgtagaatttatcctcggcatgctgctctttcagctgtgatgtcaggttggaaagcattccgcctggtacctgatacagaagagtcttgatgtttacaccaaggttcttcggattgagaagacctgtatcaagagcctcatcacgcatcggacggaagtagtcagcgatctcagcgagaagctgctgatcaaatcctgtatcatatggtgttcccttgaaggtctcaaccataacctctgttgccggctgggatgttccaagagcaaacggagacattgctgtgtcgatgatatcaacacctgcctctactgccttcatatatgtcatggaagcaacaccggatgtatagtgagaatgaagatcaatcgggatcttaacagtctctttgagagcctgaacaagctctgtagctttgtacggaacaagaagtcctgccatatctttgatacagatggaatctgcacccatatcctcgatacgttttgcaagatctgtccagtaatcaagtgtgtaagcatcaccaagtgtgtaagccattgcaacctgtgcatgtgctttctccttgtttgctgcttttacagctgtctgaaggttacgaaggtcattcatacagtcaaagatacggatgatatcgataccgttagctgcggatttctgtacaaaatactctactacatcatctgcatatggacgatatccaaggatgttctgtccacggaacagcatctgaagctttgtgtttttgaaaccgtcacgaagtttacgaagtctttcccacggatcctctttcaggaaacgtaaggaagcatcgaaagtagcaccgccccagcactctactgcatagtagccgactttgtcaagcttctcaatgatcggaagcatctgctctgtgctcatacgtgtagcgatcagggactgatgagcgtcacgcaggatcgtttccacaactttcacaggttttttctctatttctgccataattattctccttacaaatttttataagacaatgggttagacaccaaagatcgccatgaatgtaccggcagcaaccgctgtaccgataacaccagcaacgttcggtcccatcgcatgcatcagcaggaagtttgtaggatctgcctcagcaccaaccttctgggatacacgggctgccataggaacggcagaaacaccggctgatccgatcagaggattgatctttccgtgagtaaccttgcagagaagcttaccaagcataacaccaccaaaagtaccgcaggcaaaggcaacaagaccaagaactacgatcttcagtgtatctacgttcaggaacgcctcagcacttgtggaagcacctacagatgttccgagaaggattactacgatgtacataagagcgttggaagctgtttcagaaagctgtttaacaactccggactcacggaacaggtttccgagcatcagcataccaacaaggggagctattgtcggaaggatcaggcaaacaacgattgtgataacgatcgggaaaaggatcttctcaagttttgtaacaggacggagctgcgccattttgatcttacgctctttctctgttgtgaatgccttcatgatcggaggctggatgatcggtaccagggacatataggaatatgctgccactgcgatcggtcccataagagaagactgtccaagcttacctgcaaggaaaatggaagtcgggccgtcagcaccaccaatgatagagatcgctgctgctgctttaccattaaatccaaggaaaattgcaaggaagtatgcaaggtaaataccaagctgtgcagctgctcccatcaggaagctgatcgggtttgcgatcagcggaccgaagtctgtcatcgcaccgacacccaggaagatcagtgaaggaagaatactccactcatccattaagtaaaaataatgaagaagtccgccaacgccattggatgaatcctcaatgctcagcataatgtccggataaatatttaccagaagcataccaaaagcgatcggaaccaacagcagcggctcaaaaccatgtttaatggcaagatataagaacacacatgccactgcgatcatcaggtagtttccccaggtaaggttgaaaaatgctgtctgatggatcaggtttgacagggtatttgttacataagacatttgtctacctcctgtttagttcattgttgcaagagtatctccattttcaacggcagcaccctctgcaacatcgatgctggcgattgttccgtcctgaggagcaacaaccgggatctccatcttcatggactcaacgatcactacgctgtcaccagcttttacgctctgtccaacagatgcaacgatttttacaacttttccaggaacggctgcggaaactttaacagaacctgcgcctgctgccggagctgctgccttaggagctgctgccggagctgccttaggagccggagctgctgcttttggtgctgctgcaactggagctgctgcgtttccgttctcttctacagtaacttcatatgctgttccgttaacagtaattgtataactcttcattttaaaatcctcctaaataatgattatctttttctgcggttgactttgcggatggaacgtactacgaatccgtctgtgcttgttttgccttcagaagcagcgatagctgcagcgatcacggcaataagctcaccatcatctgtcacatcctcaacagcaggctcagcaactggtgctgcaaccggagccggtgctgcggctgccggagccggtttgctctcttttttctttccttccacaagtccgggaatatatttgaaaagagagatcacgaagatcaggaataccaggatcacaaatactgttccgagacccatcactgtattcatcgctgccttctccatgttctgtgccagtgtataattcacatcaactgtaagagaagtcggggttcctgatttatcaaatacataagtgaaattcgctttgtttttctcgaaggataccggaacaacaacggtatactgatcatcggaatactccactgtgatatctttctcatcaatatcaccttttttctcaccaagctcttctctggagccatcccatgcacttgcagcactctgtgtgaaagcatcctctgattccagatatccctggatatcatcctcggacattgcgatgatcgcatccgtcaggcccttggttgttgtgacaagctgactctttacagaatcatcaatctcatcagcagcccatgcagtagctgtgcatccgatcagaagtgcagctacgcaaagaagtgccatgcagacagaagagatctttttataaaactgtctcatacgctcacctcacttagactgttccatgctttttggatggacggtcttccctttttgtgaacagcatctcaaaagcaccgattacatattttcttgtatcttctgctttgatcacagtatccacatatcctcttgctgctgcagatgcgataccgttctggagttctttgtactcagctgccttctcattcagtgtagaagcgtcagctccctcatacatgatctttgctgcaagggaagcatccatcataccgatctcagctgtatcccatgcataaaccatatctgctccgacagatttgctgttcatggcaacgtatgcagttccgtatgctttaccaattacaacatttaccttcggtacagttgcagatgcaaaagcatgtaccatctcacctacagatttagccatcatcttctcattgcagagtgtagctttaaatcctgttacattagtaagagtaagtaccggaatctcaaaagcatcacagaattttacgaagtctgctgcttttcttgcacctcttgcagaaagagttccgtcggaaatctctgtcttattgccatcagcatcgtaagattcgcttctgtttgcaacagcgccaacggtagctccgttcagacgaaggaagcctgttacgacatcctggccgtaagctgcctttgtttcaaaaaactcaccattatcagcgattcttgaaagcgcaatagctgtgtcgcctgtgcagcctgcaatatcatcacatactctgttcaggtcatctgtgcattccttgaagctgtcattgtcttcattattctccggaagcatgctgaccagtgtacggatctgtccaaagatctcctcttctgttccgatgccgtcaacaagtcctgtctcctcgctctggaactgtgcggaagctgaatcgcatttttccactctgtttccttccagtgcatttggagtgtttacaaacagtctgcccttcttctcctctacaaatgtaaagtctgtaagagccggtacaactgccattccaccgccgcatgttccgaaaacagcagtgatctgtggaataacaccggatgccagtgtctgtttcagatagatctcaccaaatgcctcaagtgcatcggtagcctcctgaagacgaagtcccgcacagtctacaagaccgataacaggtgctccaactttcagagcgagatcataaattttggcgatctttttggcatgcatctcaccaactgttccgttcagtacagatgcatcctggctgtatacatacaccagactgccgtcaatcacaccatatccggtgatcacaccgtctgaaggtgcttttttttcagtcatgttgaaatccgtagctctggctgtgacagcctgtccgatctcaacaaaactgttggcgtcaagcagggaatcgatccttgcagccgctacgctttgtgtcgcattactcattatactatgccctccatttttttattaatataaccaaaaattcagccgagtataattgtaccttttttttgcagaaaattcaatacttttcgtcacgaacgttaaaaaattaacccctgacatatgccaggggtcgctaaattaatgaaaataatccttaaatactttatccacataccatttataggtaattctgtcgattttgtcatcggcggttacaaggcaggaaaggagttcttttccgttgagttttgcatggagtgtaccgatcttctggtttttctgtattggtgccgggagcttatccggaagctccgtttcccatgtgatcgtttctgtttttttcagaagatatcttttctcacgatctttttcagaaagtactgcgtgtattttcagcataacctgtttgggaggatatccggaacgatcggacttttgcggatatggatcttcttttcccggtgctgcttctgttaccgggatctcaggcagctgtggaagctccggcagcatcatatactgataattttccctgccataggaaagaagcttcttagtatcgctccatttataatttttatttccgggccatccgcatcccagaagagccacgataaataatcgctcgtcctgtcggactgcgcagacataacaatatccggcatttcctgtaaatcctgtttttccggagatcactcctgtttccatatccaagaaagcattggtattatgtaccgaataatgcttttttcctgagatatccgtgaaagtataatctctagtctgggtaatatggacaaatgttgcattttttattgcatacgccatgatcaaggcaagatcccgggctgttgtatgatggataccgccttcatcttctccatccagaccattgggtgtaacaaaatgtgtatctttacatcccaattcttttgctttttcattcatcttctctgcaaaaccttctacggatccgccgatatgttccgcgatggccacagcggaatcattatggcttttcagcatcagggaatagagaagatcctccaaataaaactgctggccttcccgcatgccaagacgtgtctgtggctgagatgccgcattcccggaaacctgtacgtaatcatctccctttgccagctccagagcaagaatacaggtcattacctttgtggtgctggcattcggccgtcctttgtatgcttcttttccgtacagcacacggccggtctccccatccatgagaactgcagaaagtgcatatagattttcgtcatctgccgcctttaccggaaagatctgacaaataataaggaccgctgtcatcagcacgacagcggccgtacaccgtttgctcataatgcatcaccccgtacacggttcatataactgtttacagtaactgttatatttaattttatgcggggatagcatccggatatcacttgtatctgttgtctgccgggatcgatcatccgttaaaggtcaggtcccatctgtcagaaagatgccctggcctgactgccagtgcagcaagctcttccagcatatccggtgccttggcaagtgcctcttccatcagactgtccagattaagaagctcctccttacagtcgatctccggctccgggctcataaaaaattcggtaataaacgcagatatcttttttcctgcgggggaaagggcatgttccgaaaggcgtctcttccttcctccatcatcacataccaaaatacaggtgaatatcttcatcattttcaatgacagataaatgttcccggtacggatcgccggtagtacctggtgtatcgtccatgcactgagaaaactggcacggatcccatgcgacggataaaaacgcaatggatctttgccggtttcatacatcagcatacggtcaaattccttctcaaagagcgtatgtgagattttcccctcggcagctacctgattgacgtaaggatgacaggtagaatccaggatataatgacatccgaaccccagcaggtaagccatcagtgcaggatttttttcctcccggaccttcgccatgcccttttcaaagaattctcttgctttccgtccatgcatctgcactccgtactgtgtcaccggatttttggatataaaataataaaacaggatatccggaccatgctgtccgatccggtacagatttccattgcttcggatcagatgctgtaattttgcggaaagtttccggtaaaccctttttccaaaaagatcatgtgcgtatgttgtgggcattttcgtcactcctcttctgttttctgatctgtccggcaggtcccggtaaaccggcatctgtccgtgttatttgttatacgtccagcttcagctggatctcttcctctgcttccgccttgaaatcctccagctggaccggatccatttccggaaggtcttccagcccctggacaccaaagcagcgcagaaattcttcggtggttcccaggaggattgggcgacccggagcatccagacgtccaagttctctcaccagatcataatccatcagcttattgatggcatgatcacattttacccctcggatcttttcaatctctgcttttgtaacaggctgtttgtaggcaatgatcgaaagggtttcaagcataacgtctgtcagagtgggtttctttggctgcgctgcgatccggataagagaatcatagtattctttttttgtacaaagctgaaaggagttttcgagctctatgatctggatcccccgctcttcttcctgataacggatcatcatatttcggatgatattttccgttgttgtcggatcctgacggatcgctctggcaatacggggtaattccacagcttctcccattgcaaacaggatggcttcgatttctccttcaattcgtttgatttccacttattgtcctcattcctactatattattcatctgcgaactctgtcagattcttccatgtgtccggatccgtgataacttccacatgaatatcatcaaaaagctcttcctgttctgcatgaacatgtcccatcttcatcagttccagaatcgccagaaaggtcacgatcagctgtattttggaatgctggttttccatcagcctgcgaaagctgaatttccggtgagcttttgcatattccttcatttccagcaatttatcagaaagtgatatttcctctttttcgattcttccgaatttacttcggatcgggtcgatcttattttcctgtctgcggatcaaagcctggtagatcgcactcatccgctccagtgtcagaccccggagaagttcctggggatcagacggtggagtatactgcagcacttcttccggaagatcctgttttcggtaataaacccctgccgcatctccaagcctgtcccgtaattcataggacatatatttgtacatcttatattccagcagcttctgcacaagctctgctctggggtcctcctcttctccttcctcattcacttctttcggaagaagcattttacatttgatatccagaagagtagctgccatgacaagaaattcactcatgatccccagatcttctttttccatggaatgcagatattccatatactgatctgtgatctccacaataggaatatcatagatatcgatcttgtttttgtcgatcaggtgaagcagaagatccagagggccttcaaatacattcagcttaacagataatgccatagggtttcctcatttcattttttcggaaggttttatatcgatcaccagcagttcccttggattatggatccgaagggggatagtatgttctccaagtccagcactgacgatcatatgctgatcccctttgtgaaagtctccacagcaaaacggcggaaggaacagatattgaggagatgaaagaccgtaatgttcactgaggcggacaacgcctccgtgatagtgtccagacaggatcagatccgcgccccattcaaaataggtttttccgtattttggattatgtgccagcaggatctgcatccctttatcttcaggtttaccgatcagttcttccatcacttcttttttcagcttcggtgatctcggcttgtgataatattcgatgggaagctccaggccccagaaacagaaacgctctccctgcaggaccatatcttcacgtccgttccttaaaatatgcacaccggcttttttcagtgctctttcgtattttgcataatatggccggtattcttcggaaaggaacattttatattcatgattgccaagtgcataatacacgggaaaatccctggcaagctctgtcagcaacttacatgcagttaccagagtatccgtttctgtacgtacagccatgtcgccggcagaaaggatcacgtccggggcaagctttcggatcgtctctgtcagccggatattgtcttttccgtaggatattccgtgaagatctgcaagaaggatcatcctcacgccctgtggagcatggatcttgtccgtatggatctcatattgtttgattctaaattttttcatattattttccaaatccgcagttcgggaaagtacaaaccggacagttcagacaaagtccgccttctcccagcctagcgatctcctctgccttgatctcatcatccgccattactctgggcaggatcagatcaaataccgttctttttgcgtacatgacgcagcccggaagtccaagtaccggtatggatcttccgttcctctcaagatatgccacaagcagcatagctcccggaagtacaggtgctccataggttacgatctttgctccggtatcccggatcccgcccggagtacgatcatcgggatccacactcattccgccggtacagatgatcagatctgctcccgcatctgcgaaagaaagaattgcctttgtgatctcttccttatcatctcccggcatcacctggcctgtcacttctgtcggaaacccggaaagcttttcccggagtactggtgtgaaggtatcctggatcagtccttttttgatctcacttccggttgtgacgatccctacttttttctgctggtaagggagaatgtcaaagatcggaagatttcctgctgccttctctgctgcatccattttctctttctcgatcacaagcggaatgatcctggttcctgcaaccttatcacctttttttatcggaaaatcgccatgtctggaagcaatcatcatttctcccagagaattcacagccacaagtgcatcacgacgtattttcagaataccatcgatctttgataccacctcgatcttaccttctttgatctcagttccatgtactttggaagagtttccggcacagattttgtaaaggatctctgcagcttcattttcgtgaagaatccccgggtttttctcccacacaaaaaggtgttcttttcctacagagagcagcagtggtatatcttcttctttcactacatgcccctttttgaaaagaacgccttttttctcatcttttatgatctgcgtgatatcatggcacagaatgtgtcccactgcatcttctgttctgatctctttcatccaaaatcccttccctgttctgttatttcttcaatccgttgtattatacatccagtctgccctttttgtcaaaatatgttgcaggcatcacaaaagaaatgcctgacaggttctttccagccagtcatggtatccggccttttttattgtttccccgtacaggatatccagactaccgatctttttcccatcctgatagtattcctgtgcccctgctttctgcccttttttcaccggcgcactttgttctttggggaggatcaactttttcttaacattgtcaggtttcgttccatctgtgctgatatatcggaatttccctctatatacaagcgaaacctgctctttgactcctttgcggagcttcagaggtttcagtggctccagagcatcatccagatacaatgtgcatttagaaaagccgtaatttaaaagagctgctgcatcccggaatcttgttttcgggtccggtgcggccatcactgaggcgatcagtgtgatcccgtttcgttctgccacagcactgagacagtattttgcaatactggtgctgcccgttttaagtcccatacacccctcatagctgcgcagcagtttatttgtgttggtcagtgtaaatttcgaggatccttttctggtaacgtgtgtgatatcctccatccagacagatgaatatgtaagaacttccggatatctgctgatgagctccctgctcataagtgcaatgtcatagggagttgtataatgctcctgtgattccgtcagcccgcagcaatccacaaaatgggtatttttcattccaagatccttcgccctctcgttcatcctctccacaaaggcttgttctgttcccgcaacatgctccgccatagctacgctggcatcatttccggaagcgatcacaatacatttgatcatggtttctgcagtctgcttttctccttcttccagaaatacctgagaccctcccatggatctggcataagcactggtggtaatgctatcctccagatgcagggttccctcacggatagcatcaaagatcaggatcaatgtcatgatctttgtaatactggccgggcttcttcgggtgtcaggatccctggaatagatcacggtaccggtttctttttccataaggactgcacccggcgcttcgatcagctgctgtgcttttccactatcttccgtttctcccctgacactaatgggtgtcagagccaggcataagactaaaatacagatcaaaagactttccggaacacttctgttcataagctcactcctgccgcaaacatctctgttctattgtaaaagctttcctgaaagattattcctgaaattctgaaaaagcatagattccggtccgtattcctgtatctttcactctgcatcgctttgctttttcagttcttcgtcatacagcttaacacctgtttcacaatttccagcagcatattttcttgcataattcgctgcatcgatcgcctcagatgcattattacattctctggtgatcagatagatcccagtgcggacacagagctccatatccggatatttctctttcatctgccgtaagaactcctgattggtctttaaaacagatgtttccggatcaacatccatatcacatggagtgaaaaggataaaatgatcagagatcgccctggtaaaatatacatccatatctgtttttagaacgcttatcacatactcggaaaactgccgcaggatctgatctcccacacgatatccgtattttgcattaatacgtttaaatttttcaaaatcggtatatatcactgcatgtcccggcccgtaacctccgatcagcattttctccacattttcgcgaaatcttgaaaaagaagacaatccggtaagctggtcccgtccggattctgcagcaatgctacgataagcactgttaaatgcttggttcttggcataatgcgcggaaatgatcttggtcacttctcccagcagcttacgatcttctctggaccagagccttttttcctggcaggtcacgtatgcaatggcccctgtatagcttccctcacagtacatggcagcacagactacggtttttgctccgcactgtaacacattctttcttccctgttccgaatattcagccagatcattctcctgaatcaccacagtaccatattcatcattgtggcgaaacaatgtgataaaatcactttttgagaaatgtatctcatctatcaaaagcctgtattcttcttccgaaacccattgaaaaaccctgtttattttctgctctgccaccttggtatgcaggactgtgatccggttaagccggaatttcagaccgatcactttcatcagaagttcaatcgctgcctgaaagctactcattttttcaaatatttcaaatgcagtagaaacaatatcattatgaagatatctggcatctatctcaacaccctcgtataattcctgcttttcctctgtcttatcctcaaaacgtctcagattatcacagaaagcatagcggttttttccatttttctttgcctggtaaagtgcccagtctgcattttcaaagagctgctgatatgtatatccggaaacattttccggaagaaagcagatccccacactgcaggttgccagatacgtggttcccggaaatttaagtttctgcacttcccgtatcagttttcctgcctttttcatgatcgctgcatggctgatatccttcaaaaggatcacaaattcatcgccacccagacgcatgatcacatcattaatgtcgaacaaagccacaaacagctccgcaaaacgtttcaggacttcatcaccgaacatatgtccgtaagtatcatttacatttttaaaataatctacatcaagcaccatcatcccgcatcctgcatagggatttctggatgcaaggtattcatcgatcagttcttttccgaaaaagcggttatacactccggtcagaggatctttctgggcacgttcctcaagaaattcttcctgcagcttctccctggtgatatctctggagcttcctatgaaataatgatatccggtatttttatcctgtgctataaatccccgtactgtcagaagactcgcattaccgtctttattgatacaccgcacttctatcgtcccgccttcccgggatgtcagaaaatccgtcaggtacttccagtcgtctttataaacattgctgtatttctgtccactggtcttaaaatccgtaatattttttacaggtctcaggtattcatccaaacgttcatatatgtccgtctcctgacagtactgaaaaagcttcagtgtagtatttcgataaatgcaagcgtatttttccaatgtatcccgaatattaaaaacgggatttttttcgtctgttttcattatcgacctcccagagagttcttgagttcacagtatttgtaaaaaagtataccatatctttgggtatatatgtagtttttttatttctttttacagtttgttttttactatataaaatacgctgcggagggcaggattactcctgccctcctgtctttttttcaggaaaatgatacgggtatggtattttttatgctgtcattatgggaatatcgatcatatctggatttctcatttacaaaagtcagcgatgcatttttgttttgcattgtcagagcagccgtaccggaagcaatcttccggggatctgtaccatatgcaggtgcagcgccttttatgatgcggacattctctgtatttgcccgtacatctttcagatagtagcgtagtaccggtttttcccagaccgtatactgccccagcgggatattcctgagagtgaccgataatgttgcatagccatttttatcggtttcatagcttcctctggtaaaggtcacataatcctcatatctgtgaggatttccggatagatccgtaccttctgccacaaaggaaaaggttggatttccatgagcccaggtaatatcctcctctttgatcttttttatgatggtgatatttcccaacggaagtgttaccggagtattctctgcttttaaatccacaatgtccgtatctgtgttttcttttttctgaaagattacctccttttcgtatttgccagtatagttttccggattttttgtttccactactttgaaccttccctgattagcatctgtaagcagcagctcttccgtagagtaccatccggtttctacgtcaaatttcaggatgctctgcccgcccaggtcattttggtaagtctgcttccctctattccactgaagcacggtaaattccgcatcttccagaacttcccctgtatagatgtctgtttttctcagacggatcacccctgtatattccttttccttttcattgacaacttcaaaggaaaggcgtgcatccttgtctgtgatatctaccatttcttcccagcttcctgtatatccgggcggagtctttgtttccacgatcttatattttccctcattatccgaggtctttaaaagttctccgcttacataaagttcgctggagatgtcataatccagaagtgttcctttttctttataggctttttttgctgcactgtattcataaagtgtaaattccgcacctttcaggatctcaccggttttcgcatcgatcttacgaacttcaatccttcgtttttcagtctggtagttcactgcttcaaacagaaattcctgcttttctcccggcttatccagcgtaaaattcttctgccagtttccggtgtaattgggaggagattttgtctcacgcacacggaattttccctgattgtcttcggtataattaaatttcccggagttataggtacgcttctgtccatcataagtcagtttttttaaggttacgtaggctttgctttttttacgccactgatacagggtgaattcagctcctgccagtggatcgccggtatttccgtctttctttctgatggatactgttccgctgatatccatgatatccgttacgctgacggttgtcgtctttccgccggttactgtaacatttttgatagcggtgttcagtttatagcctgcagcggctttcgtttctttcacatagtattttcccggaaccagttttgaaaaaaggatctctccactggcgtttgttgttccggttgaaaccttctgatccttactgtacatagtccggtatccggaggtcagagcttctgctgcaaacagtccgtactgcgctccctggatcagttttcccgtgttgggttccttcttgaccagctttgcattgccgtaaaccgatggctttactgaaaacgaaaggcctcctcttgttccctggtatacgtaagcgccaaaatcctgtactccatcttttcctgcctgggcacttccgtcaaccaggatataggaaaccggctgaagcagcattttgcaggaaaacttctttgtcgcagatgcatttaacggaaagatcagaaaaaaatatgccccatccttaaggctcaggcttgtccccgacatcattttgggattggttttctgtgaattataatccgctgcgctcgtccagtaggccagctgccatttttctgcggctcctcttgttatggtgatcccgttccctgcttttgctccatctgttactttcataagagtactcatctgaaatccgtctttcatactgtccggaacaaagggaaaacctgcaggtctgcttcgaaatacacttaacgggatcgtctttccggatgctgctgcccaggaaccgtcttcggaaacataaacggcagctttgtttcttgcagggatcgtcaatgtctggatcttatcgatcaggcggtttatccctgtatgttctacttctgctgctgtggcatatccacagtcattaaaatatacctttgacaacgcaatatgagtaaatacataacggttctgccattttgaccagtctatgtgactgcaggaggggtcgtatccggttcccagatcccccggtcctccataaccaaagtacaaaagcttttggatcactgaattggtcagtgcttttactgcctcattcttcagcgtcatactgtccagtccatcctgagttgctttcaggcaatacagaggtgaaaccttttcctctcctgtatcatcgatataatgtacagagcgatacgtacatcccatacgggttttatttccggaaccaagaaaatcattggcagctgtccagatctcatcgcagtaaaccctagtccagctgtccagataatactgggacggggaaagtgctgtagctgcgatagcatcctctccttctgagattacttccgcactgccagcttcccggaactccccgggaagtgctgcagaaagagcaatgatctctccgttttcgatatcctggatcagttcctgatcctcttcactttctcctgtaaggatttccgcgttttcttccgtgaatacagtaaatcccggatcctctatctgctccggtatctctgtcagagctatattttctccttcttttgaagcagcttccggttcttcttccggttcgatcagctcatcactgtccgtattttcagtattatctttaccttcttcaaaagctttctccaccgtttccggttcaggcaaggctgtcggaaccggcatatcagcctccccaggctgatctgttaccggaatatccggggccgcctcttcttcctccggttctgtctgttcctgctgcggatctgctgataccgaactcatatctgctgcaggactggccgaaaccacaagagaagaagctgtgatcatcaatgccatccatgcaccgatcattcttcttttcaattttttcgtcctcctttccatagcgtcagactgcaggtaagcagcgctataccggccatcagtgcaaacaggaccacaggagattcatctccggtcttcactggtgtcatccttaccgaagagctgttatttccggaagctctttctgtggcttctttcctgccattccggcgtggaacagggctggtatctgccgtctcctgatcctcctccacagaaaagatccatttcacatctgctgcccgaagagcatataaattatccagctctgccggaaccgtaacctcaaatctcaagtttcctttttctccgctggaaaattcccccagggacacggctttattgagagatgcagccagaagatccccggaatacagctttttatcattcatggtgatcaccagcttcagctttttcagaaattcctgatcctttaccgatttacattccggtgatgtgcggaagaagatctttgctgcatgctccgttgtattacggatctctacagaatcatgaaaaacatctcccggcattgccgtggaaaatccggaaaaaaagtcttccggagccgcgatcagtttgtgcgcatttccttcaaactccaccttcagatccacctgactttttttctgaaccacaagaccatcggtatcgtggatacatcttaagatcttctgatttccccagggtgacatggcacggaaatccggtgcaaaatttgccgcctggacagcatccgccacgatggtgatccccagcttcttatcctggtaggattcatcccattgggatggtacagtcacaccggtaaaaatatccacgctgtctccctgttccagcttcctggtataataaaaatactctcccttccggatccatctcggtgacattcctgtaagattcctgtcatccagaccatccaaaccttccagatcatctgtataagagatcttcacccttacccagcatggctctgagtgattggtgatcctggggatcttggatatctcatctcccggaagaacgatccggcgatcctgatatttcatttctcggccgtcctttttttccagttcccgaagagaaatattgatatctcccactgatatgtgattggtcactgtcacggaatctgaaaatctggcataagcagccgtgcacgccaggatactgcctgccacagcagcacctaccagcagggctttaaggtgttttttcaagcattccccctcctttctgcctgagcagaaaccggatctgaaaaatacctccacgcactttcataatctgaaaatccttctgcctgtacagcttcctcataaacattgatctcaaaatccttaatgctgtccctgtaagtatcatcaatcttttggggatcgatctgaaatccggtacacagaggagttgttttttcaccctcggatatttttttccggtagtaataatagccgtcctgactgttatacacccagtttgccgtatccagacctgttaatttcacgcctctgccgatatcgtcattggagtaggaaagggacatcctcacatagcagtctgcctggaaccctttcacactgccggaaaaatttccgatccggatctcttttctgtaggatggaccattctccataggcgtaggtgtaggatccggaaaatcttcctcgatctccgttgtcacataccccactgcagcagaatttatctttttttcgaagtctgaaaaatacgccgcagtccctgttgcgcacaggagccctgttgtcaggagaaggaaaacgggtctttttaatttattcatttcgtgacaccaccggcctgtcctttattctgatttacatatttctggtaagcagcagttgcctgctccagaaccgtagtcttgtcatccccggtattggtagcctggatcgcataagcccgtaccggcatatcaatctgctgtgtatccagctgaccttcgatgatattggcaaaggttactgtatcaaaaagagttgtagtctttgttcccggcttcaggatgtggttatatgcataggtgtagaccatattctgccccacttcggtccgctccagctgtgtccagtccttgtttttggtgaagctgaacagctctgtttttgcaagcgcattcctggtaccatccttggctaccgtgatcacatttcggaccggaacagaaacttccagatagacaaatgcttcatttactcctttatttgctacataggggtccttccggatcacctgagtaggaaccagatctgtattgtcctccggtttccagttaggctcatccaggtcgatatccacttttcctacggtaaagctgttggttgccgtttcaaaatccgtgagatatgcagctgttcctccggctgccagtgcagtgatcacagcagcaagtgcgattccttttaccagttttctgtttttcatcatgattaaattcctccctgtatttttttcttttttggggtatatgccagatcaaagagtactgacagacatgccgctatgcaaactgcggcaaaagggatccgggctttcagaaaatggatcacgtagcccagataaggcaggtgaaagactacccgcccgatgatctgtgacgcctctgcgggaacaggatcttctgtcttgttggcgtcaccttttgtgataaagatatccttttcttttttaaccactctgtgggtgacaacggtatctccgttatgaaaagtaatgatatctccctttttcggagaaaactctccttcctttgtaaaaaccacagctccggttgggatctcaggttccatggatccggaatagaccacatagggccggatcccgaaaagtccgggaataagaagcaccaatgccatcatcagcatcagtcccagaactgtgttgccgatacatcgaaaaaatattttcattcctgtattctgttctacatacgatatttgatgatcacttccctctgcagggaaagaaacagtgttcggatatcaggaaaattccggcggagacctgccccacataaattgagccataaaaaagtcctccctgtatagcagttaatatggcaattcgcaacatgctcccatcacttaaactcacagattttgaagtgaggacaagcataagcaaaataataatactgcaaaaatactgaatggaaattattcgagcagatatgctcagatgtgcagttcctctcattacttacagaggtgaaggattcctgcgacatttgttaaaaaagatttatttcagatgatattattatagggtccacagatccggaagtcaatcaaattcgtccgacaggattcgacactggtttctcagcggatctgtctgtcaccctatttttcataagctgacagaccctgcatccgtgcaacgccagatttttttacagctgtaccagagagtaaatatattccaatggaagcagcatcagatcacggatttcccgttcttcctcttctttatttccggaatttaccggcaattcgatccggaaagccggctggcggatcatttctccgtaatactgttccggcctgcctgtgctccttcgcccgttctgcgcttctcgttctattgcaagctgctccagctttcccctggtacatttttttaagtgacgtgcaagacggtagcatctctgacccgtggaaaaattctgatcccgccggtaataaaccaccttttttccatatccgcagaaaaccagcaggccacgtcctccgtattcctgaaagatccggatcagtgcacgtgtctcattttcactggcaggctgctgatggatcttttttctgctgcaaaaggtggtgggaaaattccttgcagtatccattcctcttgcattcccctcgaattcatcgcagggaacatcctgcattttcagcatctgacggaaaataggatttcgcacagtattgtagcccttccggcagatctcatatccatccggattgaccaccggtatgatacaaagcctggtctgatccaggagcttttttacctcataaagctcgtccacggtccagttgcattcatatattctgcaaagctccagtgccatcctggtaagcctgtccgtcatctgtccatccgttccggaaaaaccggccacacagaaaatacaggcatctccctgtccgatctccagcatagggatcatccggtcatcgtggctttttccgatcacccgaaactgcgtaaagctgctgtaacgcctggctgcctcccacagtgaataataaattgcttcgtaggttttatcctgtactgtatccatgatgttcccttccttccgtctttatacatgttcattattatgtatattatgcgaaagagcataaaaaaagaaccggtttaacaccgattccttttgtttacaaaataattcaggataccgccgccgatgatgatcaccagcgcaactgcaaccactcttttcgctgcctcctgaggaagctggcccttggaaccaatagaagcctcataaaaggtcagcgtataatcgatctcatgcggggcgcccatggccagtgtatctgcgatcacttccatcttatcatccagggcagttaccgggacagtaaaaacagaatttctgccttcctcgctctcattgagatatttttccccatctacgatcatataatcatagttggagctgctccactggagccgtgcatacatcttcccatcctttaccagcatcaatgtgggggaagaaacgctggcctttccgcttccgccttccagctccacctgtatggaatattctccgtcctccagatctgtcttcactgcgttctctccacctgcagccagaacctgtatcgggcatagcagcagcatagtcagaagaagcagcattattgttctcatcctgtgtttcatgattttctctccgttttatgtttttccttcgtatcactatagcacaatgccccttttctgtaaagaacatctcagaattgttgaaatgtctcttcttttccagtataatagagtgaaatttgcatacaaacgaaaggaaatgaacagagatgatcgaaacaaaaaatctcacaaaaaaattcgacagttttactgctgtggactctcttgatcttcgcatagaaaccggcgaatttttcggtctgctgggacccaacggtgccggaaagaccaccacgatcagtctgctttccactctgctcctgcccacagagggcgaaatcctcattgatgggcagacacttggacgcaaccgaccggatctgaagcgcaagatcagcgtgatcacgcaggaatattccatgcgccaggatatgaacatggacgagatcatggaatatcagggccgtctttatttcatgccacgaaaagagatcaaacggaaaactgaagagcttctggatttctgtggacttcttcccttccgcaagcggactgtaaggaagctttccggtggtatgaaacgaaagcttatggtatgccgggcacttcttacaagtccggagatccttcttctggacgagcccactgcaggtatggacgcgctatccagacgacagatgtggaatcttctccgtcagctgaacggaaaaaatctgaccattcttctgacaacccactatatggaagaggcacagtctctctgcaaccgggtagcacttatggatcacggaaagctggaggagatcaatactccatcgggcctgatcgacggcctgggcaaatacaccgtagatcaggaaacaccggaaggggcaaaaagccactacttccacagtcgggaagaagccatctcttttctgtcctctctggacggacagtgcacccttcgcgagacaactctggaggatgtttttgtggagcgcgcaggcaggcatctgatgcagcgataagccggcgtcagccacagttatcttataatttaacagaatggacgatgaattatcatgggaatacttactattttatgggaaaaatgggtggagttccgaagggatttctataagatcacgctggcggccatgatcgcgccgctgatgtatctgatcgtttttggaatggggatccagacctcctcacatggggagccttatctgaatttcctgatccctggtgtagtttcactgactacaatgaacggaagctttaatgctatcgcacagaatctgaatgtacagcgtctttacgagaaagcctttgaccaggttatgatatctccgacacctctgtggcagtttattgccggacagatcatcggaggcagtctccgcgggctttatgcaggaggaatcatccttcttctgaccatgccgatcggaaccggtcttgtgttcaacggatggtcattgctggtgatgttcctcaacggtgctgtattttcagccatcggtgttgtggtttctttccttgccaaaaaccatgcggatgtacctcgtttttccaactatatcattatgccaatggcttttttgtgcaacaccttcttctctacagagaagatcccgggttttcttgggaattttgtagctgctcttccactgtcacagaccagtcatctgatccgtaccattgcttccggcggtggtgtcaattacctcagtgtcctgatcctgacagtctatctaattgcattcagcattgcagcttcctggtttatctataagaagaaaaatctgtaaatttatctttacaaaaaatcaccggctttcctgttctttcggaaaaccggtgatttttttatttgttatgctattttggctattgtgcgtttagatgtccttttttcttcttctcacgatcacatatccacctgcaagaagggatgccactgccagtgcggacatggttccgatcggtgagttatcggctgttgatactgcattcttagatctggttccgttgcctccgttggaggatgttgcagatgcctctcctgttatggttgcatccggatcagaacctgtctggccgccggtaccgtatgtaccgtctgctcccggagttccggtaggtgtcagttttgcagatctaaactgatatactgcggattcaatggtgtctgtctcctgccactgaccaccggtgtagatgtatttctggaagaatacgtacaggttgtatgtagcgtctttgttgattcctttgccggaaccaatcttccatgcactatgtttctgactatcactaggattagcagatgtactccaatagagaggaacccatttaacatcttgttctcccggattatcattatctgttcctgcaccaactaccctaaattcataaaatgtatttggataaaattctagcggattatctaaatcatataccctactctcagaaactttataagatttaggattatggccttctgcaggacgaccctcttctgtaagatttaacttcaacggaactgtctctattccattattatctttaaaacgaacataaaggtcaatggccttatctggatcaagatcattaagataaattgaaatttctctatctgctccagtttctatagaattcccggaattatagatatctggtatatctgaattcccagcttcatcccgagttacccatgcataatacagcttacctgatttagaagttacaaatttagccattgcagatgtatgactggtccatttaaatgcaatccatttaacatttgccggacgcttagcttcatctaatgcaatcttctttggtgtacttacggttccatcagttcctttgatgctaacataaacatcaattgcattgtttgcatccaaatctttcaaactgatcatgaaatccttatttgcagaaacctttgttcccttgctcattttatcaactgtcggagctttggaaccacgatttacgcatttataataatacacaccagctttatcagaacgcatagttacagtagcagatgtatggctcttccatttataacttacgttggaaatctccgcaggggttttaactgtttcttttttcaaagtaacagttgcaatcttggtcactgctgtctttgatccatcttttgctactacctgcacatagaaatcaatcgcatcaccttccaaatttttcagatcaatcttacaatctttttttgcggtgaccgcaatcttgctgtctttagttgtaatggaaggttttttagctccctttgccacccatttataatagcatgtaccgctcttatcggactgaagaactacttctgcagttgttgcagttttactttctgcactgatttttttaacctttggtgctgctggtttcggatcgtctggcttctgctgtgtcacatcaatcgtctgtttttcagcttcaccgacagatccgtcatctgctattacccatacataaagatcaatggacgtgtctttaacatcagtaagattcagcgaaactgctttttcggcttcaactttttcacctttggtagcttcaccaatggtcggagctttggtattttttgctacacatttatagtaatatgtaccggccttgtcagatttaatacttgcagtaaccgtatttgctttttcgctcttagcagtaacggtaacgactggtctgttagaaacaagctgaccattctctggattaactttataattaacatcttcatattttccagccagtacactgagtgcctgtggataatcattatcaagacagtcctcaccttttacaattaccgcagatgaattctgcagcctctcttcagcattttctacagaaaatccaatctgaggatctgttatagcactgtttacagcaagctggccttctccagcaagaatgatattggcaggtgttgttccatcagcttttgtgttattagcaataatcggttctgtttctgctgtattatcaattttctcaataaaaacttttcctgtactatagacagctcctttatctgaactgttattctcaatcgtaccgcctgaaatatgaacgattccaccttcattaaaaatagctgctgctgttgttgcatctgctactaccttattattagtaagcttgatacctgttgacattgaaaattttgcgccactggctacatggatcaaagatcctgctgccggtacaccattaacagaaccaccatcaacaacaagtgtgccagcgctattgtcaagcatataaagtacaccgcttacgtcaaacagattgccagtaaagccggatgcacgctgtatcatggatgtatcatcttttccaacgatcaaaatacctttatttgccggaatcgttacgggtgctgtaatctgaattgttccactgataacgatcgtcgtaagattatctttattaacattattaatgtcaatgtcagaagctgccgcaatagctgctgctaatccggcttcatcggttactgttgttcctgttacagtttccgtctgctcctgctgcgcctcttccgcctgagcctgagctgctgcctgggcctctgcttccgcctgagcctgggctgctgcctgggcctctgcttccgcctgggcctgggctgctgcctgtgcttctgcctctgcctgggcctgggctgctgcctgtgcttcggcctctgcctgggcgtcggcttcactctgtgactggtcatccacagccgctccgtcatctggtgtttctgtattctcgtctgcagtcggtgcttctgcctctgttaccgctccggtatcttcagcggcaaacgctgcggcaggtgccattccaacagtcatggaacctgcaagcaggactgcaaaaagctgcttttttttcatttataagtcctcctgttatgagttagtctgtttaaatccaattacaaaaaagtatagcacaacgcttcaaaaaagtaaagcggaccaaagaatccgctttactttatctgttttacggacgtacctgtccattaccataaatgatatacttggtggtggtcagtgcaaggagtcccattgggcctctggcatggagcttctgggtgctgatcccgatctccgcaccgaatccaaattcgtttccatcggtgaatctggtagaagcgttcacataaactgctgctgcatctacctcatccaggaatttctgggcatgggtataatcattggtaatgatagcctccgaatgctttgtattatatttattgatatgtgcaatggcttcctccacggaatccactacctttacagaaaggatatagtcaagatattctgttccccagtcctcttctgttgcaggaactgctcccggcatcagagcctttgccgcttcatctgcacggacctccacatgcttctccttaaggcgtccggccagtaccggcagaaaatcatccttcaccttacggtttacaagaagggactcgcatgcattgcatacacccacacgctgggtctttgcattgatcacaatatccgctgccatctgaagatctgcagtctcgtccacatagatatggcagtttccggttccggtctcgatgacagggatcgtactctggtttaccactgctttgatcagtcctcttccgccacgtgggatcagtacatccacataccggttcagtttcataaattccgcagcagtttctctggaggtatcctggatcagctggatagcatcctcggtaatgccgcaggccttcaatgcctcacggatacagttgacaatggcagtattggaatggatcgcgtcgcttccacccttcaggatcacgacatttccggttttgaagcagagaccgaatgcatctgaggtaacattgggacgtgcttcgtaaatgatgccgatcacacctaagggaacacgtttctgtccgatcagaagtccgttgggacgttttttcataccggtaacttccccgataggatcttcaagaccggtaagctgacgaagtccgtctgccattccttcgatccgctccggtgtcagcatcagacggtcgatcagtccttccggcatctgattctttttgccgttttccacatccagggcattggccttcaggatctcatcggtatgagcgacaagagcctttgccacagcttccagggttttatttttgtcatttgtggaaagatttcgaaggactgtctccgcatctttcgcattctgtcccagtttttcaagcatttcattcatttccaaatattcctgcctttctttctgtctttacagcaatatcttactgtgcatcgcggtatatattctcttccgtcacaatgacctgcggacggatatccgtaggctctgtgggaacctccggaagaatctggaaggaaaatcctactgcaacgcggcagacctccggatgtttttccagaaaacggtcataaaaaccgccgccatagcctacccggttgcaattcacgtcaaaagccaccccgggcatgaccatcatggcttcttcccaagaaaccgtttctccgtcttcctttggctcagggatcccgaagtagccggattccagctgactgaaatcggtcagtctgtaaaataccatatcctttccgaaaacctttggcactgccacttccttgccgtctttccaagcctgctcgatgatgtagcgtgtgatcacttcatggttataatctgcgtatgccatgatccgttctgcattccggtattccggaagctgtgtcagggcctctgtgatccggagactgttttcccggatccaggcatcggtatgttcttttctggctttgaagatcttttttctaatttcctttttttcttccatatttttctccaagattggtgatgctgccatccttttctttgatatcgatattattcagatgcgcacggagattccccttcactgcatccagatattctctccgaagcttcgcctgttccaccttttcttcctcggtaagacctacacttttctgtttatgtgccagtgcgttgatcctgtcgatcttgatattgtccatcataatgatactctccttaaagcagtttttcgatataatcaatgaggaagaattcttccttcttgtttcctacaaataatgttccgcagctcctgccttccacgatcctgtggatgttgtggaagtcatttccgttggcaataaccatgtccgctcctgccgcagtggcgatgatcgcagcggtaagcttggtcgccattccgccggtgcctacattacttcctgtggaggatttgccaagcttacgcatattgtcatccatgttttctacaatgtcgataaactgtgcatccggattggaattgggatcgtctgtaaaaagaccgtcaatatcggacatgaggatcagaagatccgcatcgatcagtgcagcaaccacagaggaaagggtatcgttgtctccgaattttaccaggttctggaattcgtaggaggataccgagtcgttctcatttacaatagggatcaccttttctgccagaagctgctggaaggtattctgggcattcctgcggttggtattgttgaccatggtattcttagtcatcaggatctgcgccaccatctgattgtattccccgaaaagcttctgataaatggtcatcagcctggcctgtcccacagctgcacaggcctgctttttctcaagctctgccggctttccctgcatccccagtgcagctgcacctaccgcaatggctccggaggataccagcactacgtctttcccctgattgtgaaggtcgctgagctctctggccaagatctccagcttacggaaatccagtcttcctgtttctgcgtggatcagtgatgatgatccgatcttgataacaatgcgtttcttgtctttcagtcgttccctgtaatttgcgttcatgttttttgtttctcctgatacctgtatattagtcttactgataagtaacggaatcgatcctgtcattctgtacgatctccacccaggtagtacccggattcaggcggatctcctgttcatttccgtcgtaataatgcgtgatcccccatggagaatccttctcccagcggatatcaatggctctgcctctggtaataaacttgccctctccgccggaaatggcatcaatattcagatagccgtttccatcgtaggccgggcaggatgaatactgaaggatgatattgtcgcaggtaagcggttcattatccagctgatccacatgttccttgccaaactggaatctcttatattcctttgtctcttcatcgtattcataccagggatgattgtcagtaaaattatccagcttcacaaggctggctgtgatcccatccggtacagtctctgtaccatcttctgcaaaaagataatgtccggtatattcttctttatattcctggctgtatcccatggcatctatgcctgcctgaaggtggctggcatctgtataggcattgtgaggtgccttcctgtctgttgtgcggaaaaaagccagcttgccgatctggatcccgttgaggttatcgatcacatgctgctccagataaggcagtgcataggcagcctgtccgtagtgggcatagatcgcattaaattcgttggcataaaagagataatagtcacggcagctgcgaacggaaccgattcgttccaactcatcgtaatcttcgagaatacccataagacgggtaatattaccttccaccggcgcttcgtaaacaacaccggcatgtccgataccactctggggagctccgacactgttgttgcccatcatcacggcaaccggtcttctccgtccaatgctctccggaacattttcgccggtaagatagctctttacctgggtttcttcctgcttttcctcattggggacaaagcctaccagatcctgccctgctccaaaagcgggaacagtctgggcaatgcagatgcatgcagctgtgatacctgccaggatacctgtctttttcattctcatatattacctccttttcttaaagcggaagagttttccgcttagcttttccgtgggacagcccgcagtcattccggagctagcggttgatccccagcgccttcagtgccgctgcctgcttggcttccatgacctttgcctcatcctctgtcatatgatcatagcccagaagatgcagcatactgtgtgccaccaggaaacagaattcccttgtcacactatgtccgtattcctctgcctgggcaaaaaccttaggcacggagatcatgatatctccaagaaggagttcatcactgtccagatcaaaataggactcatcctcttccacaacggaataatccgccggtgtctcaaaggggatcataggaaatgacagcacatccgtaggcgcctggatattccggaattccgtatttaccctcttgatctcctcgttgtctgtcaggacaagattgacctgtccgtcatagggacatttttccatttcaagaaccttgtccgcaacctgggatgcaagggcagcatagtcaatgcccagatcctgatctgtctcatattcgatatttatggtcatcttctgtactccttattttttacagcatacctgtcatccttcctggatttgacaggcttctgttttttttcataatcgtcataggcctgtacgatctgctgtacaagtggatgacgtacaacatccttgctggtcagctgacagaatccgatatcatcgatcttcttcagcaccttcatcgctacatccagaccagacgtggcgtccctgggaaggtccttctgggatgcatctcctgtgatgatcaccttggaaccgaagccgatcctggtcaggaacatcttcatctgggcaggtgtggtattctgtgcctcatccaggatgatgaaggcattatccagtgtacgtcccctcatataggcaagaggggcaacctcgatgagccccttctccatgtttttggcaaagctgtctgcgcccatgatctgatacaatgcgtcataaagaggacgcagatagggatcgaccttgctctggagatcgccaggaaggaatcccagcttctcgcctgcctcaatggccggtctggtaagaatgatcctggaaacctcctcattgcgaaaagcagttactgccatagccatggcaagataggttttgccggttccggcaggtcccacgccgaacacgatcatcttcttacggatctgttccacatagtccttctgtccgagagtcttgggcttgatgggtctgccctgtatggtattacagataaaatccttgtcgatctcctccatcacggagccgatcttctccatggcaagggaaagtgcgtaattcacattctgctgtgtgatggtattgcctctgcccgcaagtgtgttcagttcctccacgattgccctggcctgtgtggctccctcctggcttcccaggatcttaagagaaccgtcacggaagatcatggttacgttcagagtacgttcgatcagcttcagatgctcgtcaaactgtccgaaaatattcgcctggcggtctgccggcacatccacatataattcgataatgctgctagccatcctctggtgtcctttcttttgactgcgtctttttttctgtgggggcttctcttccggtccgttcaatgacggtaagagtgcctctgctgacgcagtcctggtgatttatttctattttaacattattttcagatatttgaacccctttttctattaatttttcttcataggcataaagcctttgtatggcctgtttttttgcggcatcctctgtcagctgctctttctgtacttcgtacttcctgatcgcagcgatccccagggtaacaggagaacgaaaaatcccgatactgaaaagaggttcccggctgacgaggcgttcctcattttgtttcagaggagaggaaaagtccagaaaccagcttcccagctgaaaaaaaagccttgttttctttttatcggaccatacctttttctctatgtccaacggaaaggtatcgtaataggcaatggtatgtcggatgtaaatatccgcatctgcctgaacatatgcatagcggatgacctcctggctgtcatcggtgatgtccacgatcccggaaaccagttcctggcctttttttatttcatccccggccctgacaagaggagttccctgccgtgtgaccatggaatcgatcacaccgtccagagttgaaaacaaattgcaggatttttcttccggctctgctttttctccggcagttccctcccgaatctcaaaacgcaggcccgttcccgaaaatccggcagacacccaggtgatctctggaaattctcttcgcagggaagctgcaagtgcactgcagctgatcttttttctggatactccgaaacagaccccctgctctttcagaaagctcatcagctggggtgtgggatttaaaatatttccccggatctcaacgttccacactctgcctgacagaaaaaaaaggaggcagaaaactgccagaaaccctgcagggatcatttttcttcttttacagaaaagcagaaaaaacaaaggtcctttttttttcaggatgtggatatgtacccctgtttttcttcgcagtggcgagatctgcagaaaatccgctaccttcatggtcagctgaagctccgtctcaccggtacggatgatctttttcagatccatttccctgcctctgcaaaggttcacaaaccgctggcactgctgccccttaacagaaacccgcacaaaacctgggatcattacttatttccctcctccagcgtgatgctttcgatctgcccgcggatacatagttcaaaggttgtgtagcaggggatcacaaggtttttcccacggatcacaagtctgccggaaggtgtcagtatcaggatctcctcccttgtatagctctggatattccggtaattttcgatcactgcccggcgttttcccgtaagtatcacctgcacctcccgaaatgccggttccccgggaagctccagaaaagctgacatttttctcattaaaaaaatcctccggcttttatcattaatctatgccggaggatttcttcttatgtatctttcactgtatctgctttttgtcttttatctgcggatcagcaccatggaaaaccagagaatggtatttccacccagattatattccatagcttccttttctacgatctcactgactaccacgccatagctttccagacatggatgcatatgctccggaaaacggcatggttttccgtccagataggcacagcgttcacagaagtcacaggattccgtggaaagcgtaaaggtctcatagccctctccctccagaaaatcacgtaccttctctgtaagcgcttcgtgttccattcttgtggaaagcatctccttcatgttcatgatatccgatacctccgcaacgctggaaaagaaaactgctttcggatagctccggatcttcttttcgcattctgacagctctcccactgccggaggacaggcccatgtgctcccataacgttcacattcctgtttacagatcgtacgcacacgtgactgtactttaatatccccggtatccagcacacgatactcaaaaatgggatactgggaaataaactcatcaaatttttcttttatactgttcatacctttaagatctcctgttctccaaaaaggctcataactgctgcctcatagtcaccaaaatgctgggattttttgatctttttcagatatctggcataattggtaaagcccggtgccatataactccacaattccttcatgcggaaaagtacatttcgttctcctgaaagatattcctgataatcccggtaaagacggtcatggaactgccgcagctttttccggtattcttcccggtgatcctctccgtcttctttttgcataatggcatccagaagatagggccttgcgatcaggcctcttccgtacatgacgctgtctgcatccggaaatttctcccggatttcctgataagcctccactgaaaaaatatccccgttatatcccaggggaaccttcagcttttcccttgcctcctcatacagtccatatctgggaatccccttataatgatccttcagaaggcgtggatggatgatcagctccttcagcggatatctgccgtagatctcaagaagccgttcccagtcttcctcataatccgttcccactcttgtttttatggagatctccatcccggtcttttcgaaaatctcatccagaaaacgttccagcttatccggctcgcccaggaaaccggcaccctttcccttggctgtgacagttcccgaggggcatcccagattgagatttacttccctgtgtccgtattcatcccggaagatatgggctgttttcacaaaatcctccgcattgttggtcaggatctgggggatcaccggaagatctccgttggtttccggtgatacctctttgatctccttgctgctgagacgtttattgggcttggcagtgatgaagggcgtaaagtatttatccatgggataaaaacaatcatgatatgcattccggtaaacccagttggttacgccctccataggtgccagataattcttcattgtttatcctccttcatccggaaatagatctgctttctccctccgcttcctgtggggatcctgcctgtctcataatttcccagagatttgataaagggggtcagcttggaatatccgtaattacgcacatcaaaatccggaagtcgtttcccaagctgatcgcccagctgtccggaggaaagccatccctcttcgtcagaaaatttctcgatgatggcattaatggccttgcgcacccgcttgagatctttgttcttcctggagccggagctgctctgtttgctgctgtttccggattttttagcttctgctgcagtagccagatcttccttcttctcttcctcctgctggttgcggtagagaagatccagatatttaaactggttgcatgcggaaataaacggcttcggcgtcttctcctcacccatacccaggaccagcattccggattcccggagccttgctgccagacgggtgaaatcactgtccgaagaaacaatacaatatccatccacatttccggaatacagaatatccatggcatcaatgatcatcgccgaatcggtggcgttttttccagtggtatagctgtactgctggataggaatgatggaatcctccagaagaacctttttccaggaggaaagccgtgcactggtccagtctccatagatccgtttgtaggtggctatgccgatgtttgccacttcatccacgatgatcttgatgtatttgtctgatacattatctgcatcgatcagtattgcaattcttaattcgttgtccataaatccaaccttttctgtttaatctgtgccgtctccgatacggatcaatgctccagcatgatcttgaggatctctctgtctgtttccttcataccgtcttttccgatctgacccacacagctgatggtctctgcggtttcttcctggagaattcctgtataaggtgcataagactgcccgttcatggcaagatgatgcgccaggaaggctgcgtcaagacaggctgcgatcttggcagcacaggaaatcttggccccatcacagatgattcccggaatattggcaagggtattctcgatcgtttttttgatcagggaaatatctccgcctaccatataggtaatggcagctccggctgcacaggaggccgataccgcaccgcagaaggcagacagcttccctatatattgcttctgataaactgtgaggagattggaaaacaccagggccctgtagaggctgtaatccggcagctccatctctcttgcatagacgatcagcggaacagagcacgcaattccctgatttccgcttccggaattgataacaaccggcatatcacagccacccatacgtgcctcagaagctgctgcggtaagacttctcattctggtgagcatatcgtgagaataattttcacggatcacgcgtccgatacccaggccgtattttccggtcattccctcatgagcaatggccatattgcttctgatctgcgcatccagaagctcctttacatcggaaagctctacggtatctgcaaattcccgaatatcctccagatttaacaggccacggtccgtctcttccttttcttccactgctttatctacatcaaggaggatctctccgtttttgctgatcctggtcacgttgatatggtcgtatttgatctccaggctgacggcatcttcaccggcatacatttcgatgataatgtgaaggactaccggcgtgtccagaagctccaccttacagatatctgcctccagaagttcccggcagcgtgccctgcccttttcatcgactttggaaagaacttccatattcagtgaggcatctcctgccaccgccccaaggatcacacctgcaggaatcccctttaagcctcctgaattgggaatgatcacacaacgcacatttttgatgatatttccggaacattttgctacgatacgctccggctctttcccaaggacctctcttgctcttgccgcaccataggccagagcgatcggttctgtacatcccatagccgggatcatctcctcacggaggatcgccagatagtttttatatatatttttgtccacttttttatttaccttcccgtattttatgattatttcttttcctgatatttatgacatgctaccatatgtcccggctccacctgacgaagtgccggggtttcctgtctacagcgttcctcacaccacggacagcggttatggaagcgacagcccccgatagatctggactgtactccggtatccgtaacgatctgatccagagttttgactctcgggtccggaaccggaatcgaggagatcagcatttttgtataaggatgcagcggattggaatagagcttatctgcatctgcgatctccatgagatttccaagataaagcaccccgatctcatcacagatcttctggaccacctgcagctgatggctgatgaacagataggtcagcccgtatttttcctgaagatcctgaagcatctgaacgatctgggcctgcagggaaacatccaacgcagaaatgggctcatcgcagactacaaattccggctgtacggaaagtgctcttgcaatggaaatcctctgacgctgtccgccggagaactcatgaggatacttcagaagatcctgttctttgaggccaaccacgcggatcagttcttttgcacgctccttacgttctttctgcgtgtacattttatggatctccataggctcacagatgatatcctgcactgtatggcttgggtccagagaggaatagggatcctgaaaaacggactgcatttttttgcggtatggaagcagttctttttcccccatggctccgatctctgttccttcataaaagatctcaccgcctgtgggtttatgataacgtaggattgcctttccgatggtagattttccgcttccggattctcctaccagaccgaaggttttccccttttcaatcgaaaagcttacctgatccacagccttcagtatgcccggcttaaaggacagaagcttcggagatttctgtttaaaatatactttcagatcttttacttcaattaagggcttgctcatctcttctcctcccttctgtgacagaatatcctgtgtccctctgaagcctcataatatttcggaagacaggcttcacaggttttgtccgcatatttacagcgattcaggaagggacacagatcaccgtttccgtccgaaagatctctctccagaaactgttcaaaggtacctcccacccgcggcatgcttgcgatcagcgcctgtgtatagggatgtcccggatggagaaaaatctcttctacagttccctcttccaccacgtagccaccacacatgacagctacccgtttacaggtctgcgctacaacgcccagatcatgggtgatcaggatgatgctcatattgttttttttctgaagttccagaagcagatgaaggatctgcgcctggatcgtaacatccagggctgtggtgggctcatctgcgattaggatcttcgggtcactgctcatggccatggcgatcatcacacgctggcgcataccgccggaaagctcgtggggatagctgttcatagccttttccgggtctgtgatgccaacggctgtgagaagctccagcacccgggcctttgcttcttttttattcatattggtatggcgccggatcagctctaccatcttattgccaacagtgtaaaccggattcagtgcggaaagagaatcctgaaagatcatggcgatctcaccaccgcggatctcacggagctctgcttcatttttcttcaggatatcttctccccggaacaggatctcaccacccatgatcttacagttggatggtccgagacggagaatggatttggtggtcacgctttttccgcttccggactctcctacgatcccgaaaaaatccccctcaccgatggcaaagcctgcaccttttactgcctgtgtctctccaaggtctgtaaagaaagacaccttcagatcttttacttccagtaatttttccatatgtaaatgtcctccttacttgggctcgaatacttttcttaatacttctcccagataattgaagctgacgaccgtgatcaggatcaggattccggggaaaatagccagatacggtgcctgctggatatagcgctgtgcattgctcaacatacttccccaggaagccgtaggcggctggatacccaggccgaaaaagctcagtgcagattccatcaggatggcattggcaatgttcatggttgcagccacgataatggtaggcatgatgttaggcaggatatgatgtacaatggtggagaatttcttctgtccggagatctttgcatagatgacatactctctctcgttcagggaaatggtctcgccacggacgatcctggcaatgttcatccaggtcagaaagccgatgatcaggacaatgttctgaagtcccggtttcaggaaggcattcataacgatcatgatcaggaatgtcggaaggctcatcagcgcatccaccagacgcatcagcaccgcatccaccgttcctcccacaaaaccgctgatggaaccgatgatcacaccaagggctgtcgaaagcaccatggaaaggaagcccaccagaagggatgctcttcctccgtaaatacagcgagccagataatcccgtcccatatcatccgtaccgaaaaggtgtgccatggatggagcattcagtcgctctgtggcgctgatggcattgggatctaccggatacaaaaaggcaaaaatggagatcagtgccagcaggatgatcgctgctgcacctaccactgcaagtttatttgtcttaaaaccaagtttgatatttttccagatattttctctcatgtccctttacctcctaacatcctgctttgcggatcctcggatcaaagacagcatacaggatatctgccagaagatttccgagcaccacgagaagcgcggtaaacatggtgattcccatgatcaggggataatcatactgcataacagcggtcactgccagctgaccgattcccggccatgcaaaaacctgctcggtgataatggcaccggaaaccagagactgcaggctcattccgagaactgtgatcataggaagcatggcatttttcagtacatgccggaaaaggattccagactctttcattccgtaagccttctgcaccataacataatcggaggacatttccgtaatggtactgcttcttaaataccggatgtactgtgacgcatttgcaaaggtcagaactgcgcagggcatgaccatatgcaggatcagatctcctaaggaacggttgccgtctgaatgcataccgatacttggcaggatatggagatgcacactgaagagatagatcagcatgataccgaaccagaacgtaggaatggagatacctacataacagaacatgctggtgatcttatccagaacaccatttttattctttccggaatacaggcccagtacaatggcaatgagaaaaccaagcagcatgctggttcccattaggatcacggttgcgggaagcctctccagcatctgtgtcaggaccggtcggttattcatcagggaatttccgaaattcccgtgaaggatccttcccagccacagaaagtactgctcatagacaggctttgtaagtcccaggctttctctcaggttctggatatattcttcactcatatttggttccacataagtcaggacaggatctccgggcgctgcttttgtcagtgcaaagcagagaacagagacaataaacagtgtcagaatacactgtatcagacggtttacgatcttcttcaaaatgtacctcctttattttccccgaaaacaggaaatcggctggcgcaaaaaacgcgtcagcctctttctgtttccggtattcatccgctataaaattatttatttctccaatgtgtaaatcttggaataatcataataaatagtttttaacagacattcatcaaagcctccgaaatctttacttaccgcatagaaaccattggaataagcgatcggatagatatacatgttatcattgatcgtattctggatctccttataaatctcgccacgttttgtctcatctgcagtgctgttgccctcttcccacaatgcatccagatctgtatccttgatcctggaatagttggaacggctgtcggaagaactcatgtctgcataaaggctcggctcttctcccagagtgtagaagctcagtaccagatcataatctgtacactccgtatcctttgtcttattcttgaaggtagactcatctgtaggaagaagattgatggtgattcctacattggcaagggcagactgtacatacagagcctcactctccattgtcttatctgtggagatatacatcaggttcagagaaagacttgtctttcctgcttcggaaaggagctcctgtgctttagccggatcattgtcgtaggtattgtccggttttgtatagtagagtgtatccggcgtaaaaatagaatctgcaggctctgcataatcctcggaaaggaaagcaaactgacagaactcctctttattcagtgcgtatgcgatcgcctgacgtacctttacatcctgaagatcttggttcagctcattcatgaacatggcgttgacacgtccggaattataggtattgatgtttacgttatcgtaagcactgacggtatcgtaatcatctgcgctgatcagacgtgcatccagatctccgcttgcaagtgccgcattggcggagctggaatcctttacgatcttgaaggtgatggaatccagatttacatcatcaaaatagtcatcgaattttgttactttataatactctccggatttatattcctcgaacttaaaaggaccacttcccaccggttcattgttgagatcactttctccgatattctccacgccgtcataaatatgcttcggaatacagtaaacctggctcagtccgccaagaaatcctgcggaagatgatccaagggaaatcttgactgtaaggtcatcaaccttctctgcctctactgccttgtcattaacgtatccgtaagaagaatacggaacattctgcttctcatctaccagcacctgcatggtgaataccacatcatcggctgtgatcggctgaccgtcatgccatttcagtccgtctttgagcttcagtgtgaattcgctggcatcatcattggctgttacactttcgcaaagtccgtttccgtaatacatctctccgttcacgatctcaaaaaacgggctgtacagtgcctgcatcatatcgaagcttgtctgatccacaacataaagcggattgatgttctgcggatctgctgtttctgcaatggtaatatttccgccttccgccttggttccttctgtttctgctgcaaaaacagtcattcctgacataacagttgttcctgccaccgcagctaccagaagcgctgccagtactttttttctcatttcctgttcctcctgtgtttcagtgagtattcctcttttcccaccagtttaatatgatataggtaagataatactataccatattacctttgtcaagctgtccctggctcttcagagatttttttactgcatttcgttaaagcttgtatttattctacatacagatcacacaggcgtcaagataaattttctgtatcttgcctctgatctatatatatttccttaattcgtcatatttttgatccagtgtccgtaattgcacttcaaaaatgcaggcacgcatttaaagatctgatctgcattcaggcagcataccaccactgccggagatgccttgaccacaaatgccataaacatggacagagggatcacgatcccccaggtactgatcaggtccaccttcatggaataagcgatgcttccgcttccccggatgataccaccgtttgtcggcatctgataggacattcccaccattactacacttaagtcattaccgaaagcccgaaggcaacccctgcaatttccacacagcgcagtgtagcaagcaggatctgcgtcaccgcaaagaaaaagtaagtaaaccggatgatcgccagataggaaagaccggcttcgataatcgtctgtctgttgtaaaaagccccagcagctgtgttggaaaaaggctggccaggataaacagcataagggcaataaaaaagcctgtgcgcatggcccaggcactgatcttccttaccggctctgtctctttctttccccagtactgacttccgaatatgacaagtccgtctcccagagccataagcagctgctgaaagacgaactgtacctggtttacggtggtcacaccggataatgcagtttcgctgaaggctccaagcataatgttgtccgcaagattgacacttaaggtcactacattctgcagcaccagcatggagcataatttcagaaaattacgataaaaattcttcatcaatcttttacgatggcaatgatatcatctgcgttgatcaccagatatttctcaccctcatatttgatctcggttcctgtgtattttccgtagatcacacggtcgcccggctttacctgtaccggtacttctttaccgtctacgaccttaccgccacctactgcgataacctctgcctgctgggttttctccttggagctgtccggaagtacgatgccggatgcggttttgtcttctgtctcaaaatattttacgataactctgtctgcaactggttttaatgccatattcatttccttctttctgtgattattagcactcttgagctttgagtgctactctttttttatcatactacatatccgaaaattgtcaagatatttgcagatatgtagtatgatattatttatgatagggctctccactgatgatacgatagctgcggtagatctgttccagaaggatcacacgcatcagctgatgaggaaatgtcatcttcgaaaagcttaaagcatagtctgatctcttcagtacttcttttccaagaccgatagagccgccgatcacaaactggatatggctggtcccacgtattcccagctcgttgatctttcgtgcaaagttctcagaggtcagctgttcgcctccgatctccagagtgatcacaaacgcatcatcccggatatatttgagaagacgctccccttccttgttccgaatggcatcttctactgtttcgctggcattatccggtgttttttcgtcggacacttctatgatctccagcttgcagtaacgcccgaggcgcttggaatactccgcaatggcatcccgcagatatttttccttgatcttccctactgtcaggatacttattttcatccgccgttctcctccagataattctcaaattcttctgctgacatcaaaaccttccttggcttggttccttcctccggacctactactcctgcgtcacaaagctgatccatgatccttgccgcacggttaaatccgatcttgaacatacgctggagcataccgatggaggccttttccttctcaatgataaatttaccggcttctgtaaaatagacatctctgtcaccgccgccggctcctcccgggacaccggctgtattgacctgcttctcgatggaggtatcataaacagcaccctggtttttgtcagaaacatattctacgactgcactgacctcctcatctgaaacaaaagcgccctgcagtctggccggcttctgatacccctgaggataaaacagcatatcgcccttgccaagaagcttctcggcaccgttcatatccaggatcgttctggaatccacaccggaagatacggaaaatgcgatcctggacggcatattggccttgatcagacctgtgatgacattgaccgatggcctctgggtagcaatgatcagatggatacctgctgcacgtgccagctgggccagacggcagatcgcatcctcaacttctcccggcgcaaccatcataagatccgcaagctcgtccacgatgatcacgatctgcggcatcttctcaggtgccttttctccctccgggacccgcatattggcaacctttttgttatattctccaagattacgtaccccatattccgcaaaggcattgtaacggctggtcatctcggaaacagcccagttcagcgcaccggccgctttcttcggatctgtgaccaccggaatgaacaggtgcgggatcccgttatatacactgagctccaccaccttcggatcgatcatgatcagacgcacctcatccggtgtagccttataaaggatgctgatgatcagcgtattgatgcagacggattttccggagccggttgctccggcgataagaagatgcggcatcttggcaatatctgccactaccggttttccggcaatatccttacctgctgcaaaggacaacttggatttcgcatttttaaactcctctgactgaagaagatcccgcagcatgaccgggctgttctccttgttcggaacctcgatccccacggctgcctttcccggtatcggtgcttcgatgcgtatatccggtgtagcaagattcagcttgatatcatcggaaagaccaacgatcttgctgaccttcacacccatttccggctgcagctcatagcgggtaacggtaggtccgcagctcacattggtaacggttacattgacgccgaaattatgcagggtttcctgaagcttctgcgctgttttgcgcagatgtgcatcggaatctccctgagatctgccgtctccacgcttcagaagcttcagcggcggatactgatatggtttcttctccggagcttctccctggctgatctcatgctggatatttctgatcccatgctcgatctctgtctgagatgacttcgagtttctggagggctgatgggatgccttctgttcagcttccggctgaggatcctcctttatctcagcgggagcggctgcctttcctgtttcccgggaagcttttactgctgcagctgtctttgccggcaggatctgctgcatctcgggaatatctacatcctcgtagccggcataagcatcctcctcttcggcttcctgcatttctctttcgaaatccggctcctccgactcttcccgggccggctgggactgtgaacggtggatctggaattccagcggctgagcatgctcctccggtttctcatcaagccctggatcctcttctgtcagatctgtatctgccggaagtacagccttttgttcatcaaggaaagaaggaagattaaattctccttcccggttcgccttcaccgcagcctgtctttctttctgcgatcttcttgtttttttcttttgtttttttgagatattttccggatctttctctgtaagggcaagttcttcttcctccagctcttcttccagccggcggatcttctccgctcttttttccgcacggatctttctgcgaagctccttctgcttttctctgtccggctgtccctcaagataagcttctctgccctctcttgctgcatctgtaaaaaagtccaggatcttattcataaatccgaagaaggatctctgtgttatgatgatgagagacacaagaagcaccagaacgatgatcacagttccgcccacaacgccaaaagcggatgctgtggaaatacatactgcaccaccgaatactccaccaccggtacggtattccgaactcagtgaataataatccgaaaacgtggtacttggcgtatagccctctgtgatcagctgaagaaagccgcagaggaacacaaaaaataccacgcccgccagtacctttttgtaggcaaggcggttggtattgttcacgatcaggaacgtaactccggcaaaaagcaggattgggaaaatatatgcacaaagtcccatgatgccaaagcatacggcactgatggcatttcctacgatccctcccataccaaatgcactgatcatcaggatcaggcaggccgcaaacatcacaaggatcaagatctctgtctgaaagcggttaccgacaggctgctgcttcgccgcaggttttctttttcttttttttgtcgtttttgaagctgccattgtcagactcctcccagttgatatcaaatataattcgctgccagaataaggattccggctgcaaaagaataaaatgcaaaataacgcagtctgacctgattcgaaagcttaagcataaaacggatcaccagatagcctgtgatcccggccacgatcattccaagaacataagtaaatccctggccaacagtcatatgaacagaagtgaactctcccatctccacaaaaaaagctcccaccacagccggaatgctcatcagcagcgaatatttcactgcaaacttccgtccgaggccgcagaaaagtcctgcgctcatggtaagtccaagcctggaaaggcccggaaacacagaaaggccctggcagatacccatccacatagcatctccgaagctggtttcttttgttcccttgctgccattgacattactgtagtccacaacaaggaggatcacacctgtaagaaggattccgatcccggaaaacatgtgtgaggatgcgcttcgcacaacaagtcgtttgcactgatatccgatcaggactgtaggaatagtggatatcatgatcagggcagtaagcttccggtaagttccgcttatgatctttgcgtaggtaagctctttcccagtcctacggttatagagaaaaatattggcatttccgatcagatccagtatcattccgatcagctcgatcccgatcttcttgatgtccttcagaaaaacaaggattagagctatcatagttcccagatggagcatcacttcaaaaagcacaccggagcctctggtaccgcccaaaagatcctgcactccacagagatgtccgaaactgctcaccggcagaaattcggtgattccctgaatgattcccaatataatcgcatgtatcactgacataatgatatttccttttcttaaattttttccaacacattatagcataactgagtaaaacttacaatcttcacttggcaaaagtttcaaacaaatgttcttttttgatctgcaagaaaaaaaatcctccggctgcatcagaaaacacagtcggaggatctgtttataaacagactttctgcttatttatttttcagatattcgtcgataccttttgcaccagctttacctgcacccatggcaaggattacggtagctgcacctgtaacggcatcaccaccggcatatacgccgtccttggatgtcttaccggtttcttcctcggcaacgatacatcttctcttgttgatgtcaaggcccttggttgtggaagagatcagcgggttcggtgaagtaccaagagacatgatgacagtatctacatccatatcatactcggaaccaggaatctctaccggacgtcttcttccggatgcatccggctcaccaagctccatcttgacaaccttcataccgtttacgtggccgttctcatcaacgaggatctccttcggatttgtaagaagatcaaagatgatgccctcttccttagcgtgatgaacttcctctgctcgtgcaggaagctctgcctcacttcttctgtatacgatatgtacctcagcaccaagtctcagcgctgttcttgcagcatccatggcaacgttaccaccgccgacaactgcaacctttttgcctgctgcgatcggtgtatcataggaatcatcgaatgctttcatgaggttgcttcttgtcaggtactcgtttgcggagaatacaccgcttgcattctcacccgggatacccatgaacatcggaagtcctgcaccggaaccgatgaatacagcctcaaagccctcatcctcgatcagctgatcgatggtagtggatttaccgatgacaacgtttgtctcgaatttaacgccaagctctttgaccttctcgatctctttcttaacaaccttctgcttcggaagacggaactccggaataccgtaaacaagaacaccgccaagctcatgaagagcctcgaatacagttacatcgtatcctgcctttgcaaggtcacctgcacaggtaagtccggatggaccggaaccgatcactgcaaccttatgtccgttcttaacctctgctcctgcaggtttgatatcatgctccagagcatagtctgcaacgaatctctccagcttaccgatagaaacagcctcgcccttcttaccgcggatacactgtccctcacactgggattcctgcggacatacacgaccacagatagccggaagtgcggaagataaaccgatcaccttgtaagcctcttccatgttgccttctttgatgtgctcgataaatcccggaatattgatggataccggacatccctctacacatttcggttttttacagccaaggcatctctgtgcctcttccattgcttcttcctgattatatccaagacatacttcctcgaagtttgtcgcacgtaccttcggatcctgctctcttacaggaactttttttaacatttttgcatctgccattagttgtcacctccgcaatgtccgcatccaccgtggtgggtatcgccttcctgaagcttcagtaatgcacggccctcctgggtcttatacatctggcttctcttcatagcctgatcgaaatcaacgagatgtccgtcgaactccggtccgtctacgcaggcaaatttgatctcatcaccgacctggagacgacaagcgccgcacataccggttccgtcaaccatgatcgggttcatgctgacaattgtgtggataccaagcttcttggtaagaagacagacaaatttcatcatgatcatcggtccgattgctacacagacgtcataatgcttgccctcgtttgtcacaagatcttcaagagtctttgttaccataccggaacggccataggaaccgtcatctgttgtaacataaagattggaaacagcgccaagctctttctcaaggataaccatatccttagtcttggaaccaaggataacatccgctgtgatgccgtgctcatggagccatttaacctgcggataaacaggtgcggtaccgacaccaccggctacgaataccatttttttcttcttaagttcttcgatatcctcatgaacgaactcagacggacatcccagaggtcctacgaaatcacggaatgaatctcccgccttcagtgcggacatcttaatggtagatgctccgatctcctggaatacgatggtaactgtaccggcctcgcgatcgtaatcacagatggtaagcgggatcctttctcccttttcgtcaagtttcacaatgataaattgtcctggcagacagtggcttgccacacgtggtgcatgcacaaccataagatggatcttagctgccagcgtttcagcttttaaaaccttatacatggtcttcctcctcgcgcaaattataaacctttattaataatacgctaaaaatcagcatatgacaagagtagatttacaatttctgtcaaatttctttaccacagcacagcgcaaccatgttagtcttatgcaactaacatcatcaaaagccacatacaaaactggttatttctgtgtttttttcctttcgataagggtatacaatcggtccagtgcttcccggatccctcctacttcatcgatgagtccttcctttaccgcttcctcaccctccagcatagtccccacatcttttacaagctgggaggtatccagcatcagctcctccatccgctctgccgtgatatgtgaatgtccggatacaaaggcaatgatccggtcctggatcttttccatattgcggtaggactgcgccacgccgatgaacattccgttctggcgtaccggatggaccaccatggtagcacttggcacgataaaggaataatctgctgataccgccatgggtacacctatggaatgtcccccgcccagcaccagggaaaccgtagggatactcagagacgcgatcatctccgcaatggcaagccctgcctccacatctcctcctaccgtatttaaaaggatcagaagcccctcgatctcctcatcgtcctcaatgagagccagctttggcagtacatgctcatacttggttgttttgctgtgagacggcgcggattcatgaccttcgatttccccgatcaccgtcagaagctccactttatgcttccggaaatttccatcgagcactgcctgcccggtttcccggatctgttcgttctggctcgcttcccggtccagttccttctgttttctctcttcgctctgtttttccataaaaaaatacctccggaatctgaaattctggaggtattatatgcaaaatattactttctattcagagatcattcgtcccagtttgtccatacgtcagtaacgtcgtcgtcatcatcaagaagatccagtgttctgtgaagatctttgatagcctgatcatccgtcagctccacataggtctgcgggatcatggcgatctgtgcttctacaagcgggattccggctttctcaagagcctcacgtacagcactgaaatcgtccggtgctgtgatgatctcaaagctgtcctcttcctcgttgaagtcctcagcacctgcatccagagctgtcatcatcagctcgtccgcatccatctcgccgcactcatcctcaagctcttccttatcgatgatgatctggcccttctggtcgaacataaaggatacgcatccctgtgttccgatgcttccgttacccttggtaaacgcgttacgtacattacctgcagtacggttcttgttatctgtaagagtctctacgataatagcaacaccgttcggaccatatccctcatatacagccttctcgtagctgtctgcagaatccgcacctgctgccttcttgattccacgatcgatcgtatcgttcggcatgttgttcgcttttgcttttgcgatgacatcacgaagcttgctgttgtttgcaggatccgggccgccggcctttactgccataacgatctcacggccgatgactgtgaagatcttacccttcttggcatcatttttctctttcttatgtttgatgttggcaaattttgaatgtcctgacatggtatcttcctctccttgttaccgtatattttctttcgtgccctgctcattttgggtaccgttttacataattgcaactcggtttaatatagcacttatgaaagatttcgtcaagaatcagaaaacaaaccggtcaaaattcctcatgttcccctaaaaagtcagttccagactgatctcaagcgcatgattcaccttatcaagcatagcactgtccagatgacacaccttatccttcagacgccgcttgtcgatggtgcggagctgttccagaaggatcacggaatccttttcgatcccgtaggcggatgcatcgatctcaatatgtgtcggcagttttgccttattcatttttgatgtaattgccgcacagatcactgtgggactgtgacggttacccacatcgttctggatgatcagcaccggacggatgccgccctgttcactgcccactacaggtcttaagtccgcgtaaaaaatatcccctctttttataaccacacaattcacactccgattctggtccggcttatttgcaagccgtattcctttttacagataagtatttccacaatttctttgtgtataccatgcgtggtacttttttaccggccttatgtctgacccggcgttttccagatccgggtatttacggatctactggaaaaagctctcctcttctccgcattccttaccgtctttgatataaacccgcggaacacgtttactgatcccacagacaaattcataggaaaatcttccggaaagatctcccagtgtctccacactgataaattcctctccatctcttcccatcagagtgacctcgtccccggccttcacctccgggatatctgtgacatcaaccataaactgatccatgcagacccgtccgaggatcggagcttttttgccccggatcaggacccagcccttattggaaagctgtctcggatagccatctgcataacctacggggatcgttgccattctggtaaagcgttctgtaacaaacgttcctccatagcttaccgctgttccacgttccacatttttcacataagatacatgacttttcagctccattgcaggtgtcagcttcacaatatcacgttctacctcctctgacggataaataccgtaaatggtgatgccggcacgaacgacattgagatttgcttccggaacacggatgatacctgcactgttggagcagtgacgtaccggaatatgaacacctcttttttccagaagctctgcaaaacggagataacggtccagctgcaccagtgcaggagaacggtcggtctcatccgccctggcaaaatgggtaaacattccctcgatcaccagattcgggatttttgagattttttcgatctttaccgcattttccggaatatccgcatatccgatccttgccattcccgtatccagagccagatgaatatgtacattttttccaatgcgtgcacctgcttttgcatattctgctgctgtattaagatccgatatggtgatccggatatcattggctgcaagttcctcataatattcctcaaatacaaggccaaggatcaggacaggcttggtgatccctgcatgccgaagctccagtgcctcctctgcagtagctgttgcaaatccccagatatagtcatagtcctggatcagacgggcaatagctctggcaccatggccataaccgtctgccttgatcacagcgatgatctttgtcccttctttgacatttttatgcatttcctcaaaattgtgggcaatggcatccagtgataccagtgcttttactctctcgtattttttcataatcccgactcctcttcacctatagctaatgccttgggcagatattctatgatatctcctgccagcatactgcgctttcctttttcagcggctgcaagatcaccgcaaagtccgtgaagataaacacctaacgcggcctttaaaaccatgggaggctgttcctccgttttcagatacatacataacactgctgccaggatcccggaaagcacatctccgcttcctgcagttgccattccggaattaccggaaagattcagatacatctggcctttctcatctgcgatcaccgtacatgcatccttcaatacgcacacagagcctgtttccgcagcacatttcagtgcagtatctgcgatctcatgctggatctcctggatcgttctgccactaagccggctcatttctccgatatgcggtgtcaggactacatgctctcccagatactggtaccactgtggatgtgcagccagaaggttcaggccgtccgcatccaggatcagcggctttttctcccgggcagccgccgtgagaaaccactgttctctctcacggctggccactgatgttccaagtcccggtccgatcacgatcacatcacaccaggatagaagctgttcattggattcctgatcaaagcggctgcagaccatagcctccggaaggagtatctgcagtgggatcctgttggcttccacagtctggatctttaccattcccgcaccggcacgaagtgctgcactggcgcttaaataagcggctccacacattccctcacttccggtcacaaagagcacttttccgaaggtacccttatttccgccgggatcacgttccggaaacagcttcagatctttattttccagacaggcggcagatgcagtcacagcttcctgctcatagatcccgatatcggcggtaacgatccttcctgcatacagtcttcccggataaaagcaaagacctcttttccggtaggcaaatgtgacagtcagatcggcgctgaaggcaattcccatttccaggccagtatctccgttcactcctgacgggatgtcaactgcgatctttttggccctcgcactgttcatctcatggatgatatcagcataatgcccctcgatcggacgcgtcaggcctaccccaaacacggcatctactatagtagtatattcactccactgcgggttattcacctccgggacacgataaccggaagcaatcttatactgaagagctgtctctctggtcattttatctttgtttccgaccatataaaactctacccggattcccttcagatggaacaatctggcaacagcgataccgtcaccgccattatttccgcttccgcagactaccaggatcctttcgtccttctggagatacttttctgtttcctctaccaccttcagtgccgcccgctccatcagaacctcggagggaactccgatctcacggatcgttgtggagtccagatccttcatttctttgcaggtaacaagcttcttcattctgtcttctgcctcccctctgtcatagagaaagctgccgtttccggcagcttaacaattcttacttatccacatgttcctgcctgtatttgctgagattataagacagtgtcatcagactctcggaaagatgaacgttctctacgatcacatcatccggtgtctcaagatcgagatgtgcaaaattccagattgccttgatcccgttctccaccaggatatctgccatttccttggctttattcttgggaagtgtcaggatcgcgatctccacgttattctctctcaggaaaaacggaagctcactgagcatctggatctcaagtccacggactgcgatgccctcaagcacaggatttacgtcaaagataccaaccagcctgaacccgcgcttctcaaaatccacataattggcaagtgcctgtcccagattaccggcacccaggatgatcatcggatgaacggtatccagtcccaggatcttaccgatctctgtataaagatagtgtacattatagccatacccctgctgcccaaaaccgccaaaattattaagatcctgacggatctgagaagctgtggtatgcatctttttacttaattcattggaagaaatacgttctacattatcttccatcagctctcctaagtagcggtaatagcgtggcagacgcttaatcaccgctttcgagatttgttttgtctccacgatagttttcctccttaccttacactaggttaattataacgaattgacattttcctgtcaattaaagttgtctattctgtacaaatttctttatattttttctaataattgattttttctttgaaatcccggcagtttccgttataataggtggaggatttttccctgttcaggcataaacaggggtgattctttatacaggaggacagtttttatgattttatcatgtcagaatatatgcaaggcctttggcgaaaaagtaattttaaatgatgcatcctttcacattgaagaccgtgaaaaggctgctctgatcggatgcaacggtgcaggaaagaccacactgctgcggatcatcatgcaggagctttctgctgattccggtaccgtggtgcttgcccgggataaaaatatcggctatcttgcccagtaccaggatatccacggacatcataccatctacgaggagcttcttaccaccaagcagcacatcatcgatatggaacgccgtatccgcaatatggaacaggaaatgaacacggtgaccggtgatgagctgaaccgtctgatggaaacctatacccgcatgacccatcagtttgagctggagaacggatacgcttacaaaagcgagctgaccggtgtcttaaagggtctcggcttcacggaggaagattatgacaagcagatcgaaactctttccggcggtcagaaaacccgtgtggcgctgggcaagatgcttctttccaagccggatatcctgcttctggatgagccaaccaatcacctggatatggaaagcatctcctggctggaaacttatcttctgaattatccgggagctgtttttatcgtctcccatgaccgttattttctggataaggtggtcaccaaggtcattgagattgaagccggacagacccgcgtatacagcggcaactactctgcctatgctctcaagaaggctcagcttcgtgacgcacagtacaaggcatacttaaatcagcagcgggatatcaagcatcaggaagccgttatcgccaagctgaaatcctttaaccgtgaaaaatccatcaaacgtgcggaaagccgtgaaaaaatgctggaccgtgtacagaggatcgaaaagcctcttgagctccaggaccggatgcgtatctcgctggaaccacgggtgttaagcggaaacgatgtgctccacgtggaagcgctttccaaggcctttccgggacagaccctgttctccgatatctcctttgatatcaaacgcggcgagcgtgtggcactgatcggaaacaacggaaccggaaagaccaccatgctgaagatcatcaacggtcttattgaggcagatgccggcaaattttcccttggttccaaggtgcagatcggttattacgatcaggaacatcatgttctgcatatggacaaaacaattttccaggagatctccgatacttatccgactctcacagagactgagatccgaaatatgcttgccgcatttctctttaccggagatgatgttttcaaggagatctccgcactttccggtggagaaagaggccgtgtttcccttgcaaagctgatgctttccgaagccaacttcctgatccttgacgagcctaccaaccatctggatattgcctccaaggagatcctggaggaagcactggtcagttacaccggtacagtcctttatgtatcccatgaccgttactttatcaatcagactgcgaccaggatcatggagctgacaaaccaggcagtggtaaattacatcggtgattatgattactatctggaaaagaaggaggagctgaccagtacctatgcaccgggaagcacttctccggaggcacctgccgaagaaaaagcggtttccgagaacaagctttcctggcagcagatgaaggaagaacaggcaaagaaacgaaaacgggaagccgagctgaaaaaagtcgaagcccgtatcgaagagctggaaacaagagacagcgagattgacgaaaccatggtccttccggatgtctgcaccaatgtagcggaatgtacaaagctaagccgcgaaaaagcagccatcgctgaagaactggaagagctttatgaaaaatgggaagagctggcctgacggtcagctcttttttatccccttatgtttttatggaagcagcatgccgagatgctgttcaaagcatacgccatcgttacggtctgttccttcctccaccgcatcccggatcgatgccgagataaagtccacggccagctctgcacaggttttcatggaatatctttttaccagccctgcactgagcacggatgcaaaaagatctcctgtcccggaatagcttccgccggatttctctgcaaatacccaggagctgtttccgttttccaggacaagatttcccattttcagaggctgcccctcctccctgtgatccactccggtgatcacaacggcaggaagtgaaaatttccgggcaagtccgcacccgatctcccggatctcttccatccgccgggcctctgataccttttgcagttccttccagatctcctccattttttcttttccgtagagaagaaggagggcttccgtaaggttcggtgtgatcacataggaacgacgtgtcagttcgcagaaccggctgcggagctcttctgtatagatcggataaaccgcgccgtcatcccccatcaccggatctgtaaggatcagagtatccttccctgcaaacgcatccataaatttcagaatcctgtctgcctgcttatcatcagaaagaaatccagtatagatcccatccgggaaaaatcctctttttttccactgctccatatatggttccatatgctctgtgaaatcctcacagaaataactttcataaccggtctggttgcttaaaacagcggtgggaagtggacacgcctggactcccatcaccgagatcaccgggatcgctgctgtcagtgaacatttccccagcccggaaagatcattgatcactgctatttttttcatggtaattctccagtcttgagtttttttctgtaatattatagaatgaactgtcaggtttacgcaatcatttttggaaggaaatcatcatacttatgttaaatatatccgcagaacacaaaaaagaacacctttatctggaggtttaccactattaccggaagctgatcctggaaggccgtctccttcccggaagcaaaatgccctccctccgcaaatgcgcccaggagctgaagctgagccgtaccaccatcgaaaatgcctatcttctgcttgcagcagacggctacatcatcgccagggcacagagcggctattatgtcaccggcattgcttccaagcagcatctgcttacccccgaaaaacaggataaggatatcacgccctgcctttatgattttgcctcttccggtgttgaccgggaaagcttccgttttgatctgtggcagcgttacatcaaaagcgccctccgccagggcgaccgtatgctttcttatggcgaaccccagggcgaaagcgatttccgggaggttctcgcagactatatccgggaacgcagaaatgtgatctgctccccggatgacattgtagtaggggccggtctccagccccttctccagatcctctgccctctgatccatgaacggaaaaccgtttcgttccccacaccgtccttcaccacatgcagcaccatctttcaggattacggctttgatgtccattaccgggacaaaagctgcgatgtgatctatgtttctcctgctcacatgacgaaatggggcgagatcatgccggtaaaacgacgcctggagctgatccgtcatgcggagatcaatgaccatctgatcattgaggatgatttcgaaaacgaatttgtttatttccagaagccgacgccttcacttttcggtcttgcaggtggtgaaaacgttgtctatatcggttccttttccaggctgctgctgccctccatccgtgtcagcttcatggtactgccacgctctctccgggaaaaatatacaaaaaaagcagccttttataatcagactgcttccaaggcagaacagatcgcgctctgccagtttatccgcgacgggcatctggcttcccagactagaaagctccgccgcctttattcccagaagctgaaggctctttcccaggctgtccgggaaaccttcggccaggactgccagatccaaacaggagccgcaggaaccagccttgcccttactcttccctgttctctcacaggcagtgaactgacagacagagcccggaaccgtggtctgggactggaggttctcagagaaaacggagccgaggtcaccctagtcctctcctgctcctccattccatccaaggattttctgcctgcctgtcagcttctgaaggaggttaccggctcctaatctctccggttatcgatcatgtagagcagggcatttacaatgcacgcagcaatattgcttccacccttgcgtccttttgccacaatataaggcacatctgcgtgcatgatcagctccttggactgcacaacattcacaaagcctactggcacaccgatgatcagctcaggagaaagctttctgttctcaataagctcataaagacgtaccagtgcggtaggtgcgtttccaatggcaaagatcagctttttatccatctctgctgccttatccatgctggctgtggctctggtagtcccgttcttttttgcaagggctgccacatcctcatcggacatgaagcagtaagcctcaccgccgtagcgggcaagtgcacgcttgttgatcccggcctttgccatctgggtatctgtgacgatacaggcaccgttgcggatggcgtccatggccatctccactgccccctccgagaagcagagattttttgcataatcaaaatctgcgcttgtgtggatgcagcgttttacgatcagctctgttcccggaatcaggggagtatcccccagctcttctgtgatgatctcaaagcttcttttttcgatctccatgggttttacattttcaagctcaactttcatttctattcttcctccgtaatcccgttttccagtatctcatagatttttttcatatccagatgcttccgcagctctgcagccaggatatcatactgctgttccttaaatgccgcaaaatccacgcctgtcatattttccacatcaataccttttttctcgccgatcacgcggatgatcgcctctgcagatgcttccttatcaaaaacaccgtggatataggttccgcacacatttcccgcaaaagcaccctcttcttttttcttaccgctgacgctgtctgtgatcttcgtggctgttcctgcattgtccttcaggatgctttcgcccatatggatctcatagccctcgatctccgcaccggaaagaggagcaaacacaccggacagctgaccgaaatgcccctgcaccctggtcctggttttcttttcggcaaataccgtttccatgggaagaagtcccattcctttcatggaaccgccattttcaacgccatgaggatcgcttaaggtctcgcccagcatctgatagccaccgcagacaccaaagatcagcttgcctctggaggcttccttgagaaccgctgcctccattccgctttcccgcatccagatcagatcacccatagtgttcttggttccaggaaggatgatcatgtccggagagtgaagatctctcgggtgttttacatagcgaagagaaactccgggaatgctctcaaaaggattaaaatccgtaaagttggagatccttggtgtacggactactgcgatatcaatgacaccggcttcctgcttccggtcaaaacgctccgtcaggctgtcctcatcctccacctggatatccagataaggcgccacacccaccaccgggatcccgcttctttcctcaagcatgacaacaccagggtccagaatagtcttatctccgcggaatttattgatgatcagcccctttaccatagccttctcatcgtcctccagaagctccaccgtaccgatcagctgggcaaaaacacctccacggtcaatatctcccacaagaaggaccggtgccttggccatctttgccatacccatatttacaatatcctcatccttgagattgatctcggcagggcttcccgcaccttcgatgacaatgatatcgttttccgctgcaagagcgttgtacgccttcatcacatccgggaccagggtcttcttatatttgaaataatccctggcactcatggttccaagaacctctccgtttacgatcacctgggagcctacatcattggtaggcttcagaaggatgggattcatcaggacagacggccggatcccggctgcctctgcctgcatgacctgggcccgtcccatctcaagaccatcctctgtgataaaggaattcagtgccatattttgtgatttaaaaggagccacacgatatccatcctgcttaaagatcctgcaaagtcccgcagccagcaggctttttccggcattggacatggttccctgtaccattattgcttttgccataatatacctccctcaagtacttcgatcagttttacattttcttcatggcgctttaccgcgatccggtaatatccctttgtaagacccggataattgctgcagtcacggatcaggatccgcttgcgcagacagaagtcaaagagctcctccggtcctttaaagaaaatataatttgcttccgacggaaatactttatacccaatgcggaccagctcatccttcagccactgtgcctcccgaaaaacaagctgccttccctcctctacatattccgtctctgtaagtgcctggagcccggctgcctgggccatggtggaaacattccatggctgaacgcagagctccatcctttccatcagctttctgtcagaacagaggccatagcccagccgcacaccggccatggcatatctttttgtaaatgcctttaggataaaaagattattgaacccggaaagagaatgcttcagagaatactcttccggttcctttacaaaatcaaggaaacactcatctaccaccagcaggatatcaagctttctgcatttttccaggatccttttcagaagcctgtgggggataagcatgccggtaggattgttggggttacataagaaagccatatccagtcccttatggaggatatccagataggcttcactgagcacaaaaccgtcattttccgtcagcatgtaatattccagctcacagccagtgctggccagagcctgtccgtattccgcaaaagtaggcgccgggatcaaagcccgctttggctttactgcatgacagagcgtaaagatcacttctgctgctccgttaccgcatattacctcttccgcttttaccccttccgattctgcgatcctttccctgagaacgccgcatcccacctggggatactgtgcaatatgatccagactgtggataatggcctgcttcacactttccggtgttcccaaaggattcagatttgccgaaaaatccaggcagtctttatgtttatatacgtctcctccatgtatgtgttttgtcattggtcattctcctgtctgtatttattgttaccttaataacccgaaccggatccccgcactgagcagtccaaatacaaccacacccagtatggatgccgcgtacatcagccggttagctcttttgatatcctccggctccactgggcggatcggatccccgatcgtgggtttttcatataatttcccgaaataatatgcatttcccgcaagctgtacatccagcgctccggccatggcagcctctgtctgggctgagttggggcttgcatgattcctcctgtcacgtttgtagatctttgccgcgttttttgtatccattcctgtaaaaacagttcctgccaccatcagccatccggaaatcctggcagggatataattggccacatcatccagctttgccgcaatacggccgaaataaagatatttgtcatttttatatccaagcatggaatccatggtattgatacccttgtacaaaaacatcagcggcactccgccgatagccatataaagcatgggggcgatcacgccgtcggatgcattttccgcaacggtttccacggcagcctttgtcacgccggtttccgtaagctctctggtatcacggcctacgatcatggacaccgcatagcgtgcctcgtccagagttccgtttttcagccggtcataaaccttcatactctcatccttcagggaacgggtggcaagaagctgatagcaccagaaaacctccagcacaaatccggccaccggcagataccggtaaagataataaagcaccagaagcggcaccccgccgctgaacagacagacaagcactacgatcagaaagcctcctgtcagctcaccgccgtgatttttcggaaaaatcttccggatcaccttttccagcactgcgatcagattgccgatgacacagatcggatgataaagccatctgggatctccgatcagaagatccagcacaaatcctatggccagtgcaggaagactatatttcagcatcttttttctgcctccgttccttcttatattccagtgcgttcttcagaaagcgtgccggaaccctgggatttccgtaataataaagatgcggaaatcctgccatcagcctgccccggtcatggatacaatcccatcctcttttagatgccggctttgccgcatgaaaatcctctccgcaatctgtggaatcaaagtaatggaattcatgagccgggatctcaccaagtccggtatcctgtttttccgtaagggtgatatagccgaaccggttcagcttcggtgtccggtaagcccttccagggatcaccccgcagactctgcgctgctttccttccatatcctccatctcctgatgaagatacatgaatccgccacattctgccagacaaggcattccgtccaggataacttcccggatccgggtgcacatttcctgattttcttccagcgcctccccgtttaattccgggtaaccgccgcttaaaagaagcccgtccagatcctccggaagctctctgtcatgaatgggggaaaaacgtaccagctccgctcccatctgctccagaagatttaaattatccgcatagaaaaagcagaaggcttcatcatccgccacaccgatccgcaccttttcctctgtatggtatccgaaggcagtatccttctgtatcagcatttccgtctctggtgccgcaagctccggtgcttcccctgcaagctccaggatcccatcgatatccagggttttctccagtacctcggaaagcttctgcagacggcttttcagctccgggatctcctccggaagcaccagccccagatgacggctttcgatcacacagtcctccaccttcggaacatatcccagcacctttacggaaagctcctcttccagaagcttcttcatcctgggatacagcatgggagacatctggttaaagatcacgccgcagatatgactatcctttttgtattccagaaagccctttacataggcagccagggaaacactcatgccacggctgtttacgatcaggatcaccggtgtatctgtggtggaggccagatcataggcgctggctctggaggtgatccctcctacaccgtcataataccccatgactccctccatcactgcgatctcacagtccgatgcgttctttgccagaagataccgggttctgtctccatctgtaaaaaacgtatccaggtttcgggatcttgtaccgatcacacggctgtggaacataggatctatgtaatccgggccgcatttaaaagaagccaccttaaggccacggttcaccagcgcctgaagcagcccgcaggtgatcagggtttttccgcttccgctggcacctgccgcaagaagtattctcgggaccttcacctaaatctcctcccctcttccgctgcaggaaatgatatagatcggattctcacccatcatcatatgataccttccgatagatttggatcttgccgcagacagctgtacgatatccacatccgtcaggctgaaatctcgtatggcattcatggcttccgtcaccgtctccagagtgatgcaattgatcacgatccgtactcccggatttttatccagaagaagccggatgatctcgttcatgtttccggaagacccgccgataaaggcatgtgtcggaacaggtagttccaccatcgcttccggtgcagtaccaggcacgatctccagattgtctgtggcaaatttccgcctgttctccttcagaagagcaagggcatcttcctttttctcgatggcatagacctgacccttccaggcacgaagcgccatctcaacagaaaccgagcctgtgcccgctcccacatcatagcagacagaatcctcctgaagacgaagcttggacagagaaaccgtacgcacctcttcctttgtcataggcgccttcccacgaagaaattcctcatcacagatcccgtgaactgcgggcaaaggtactgcgttttcattgcacgcagttaccacgcttaacgcatcaccccggtattctgtaagctctgccgcattggcatgaaagatcttttcattttcgtaggaaagattttcgcccacataaagggtcacatcacccattccatacgcaaccagacgagaagccagacgagctaccccatcctctgttcccagaatggaaaaaaccttggggttatgccggatcagggcaatcagattgcagtctcttccatgagcgctgacgatcctggcatcatcccaggaaagaccgatcttcgccataaaataaacaacggaagaaatcccgcagatcacctggacatcgccatccagaagatcgatcagcttccttgcaccgctgtagaagcccacatcgccggaaagggcaatggctacggtacggtactgtggatgtgtcttgatatactccacgatcttatcactgcggtactcatggagaaccatctgccccggcctctgtacggcatctgtcatacgctttgcaccgatcagaagctccgcctcatcaaaggccttctttccttccaaagtcagggttttttccgcacccatgccgatgcctacaagagaaaccctctgtgacagggtaaggccgaacagctttgccagaaatacccttgcttccggcagggacagcccctcctcctgcaatggtcttccgatgatcacaggtgtgacgccgcagcgctgacaagcctccatcttttccgggaatccacctgccagaccggtatccttggtgaccagatagctgcactgaaactgtcgaagcatggcttcgttgatctctgtggaaaatggcccctgcataccgatgagatgctttccttcgatccccagctccgcgcaggagctgatcacggaagggatggacagcacccgggcaaaaagcctctcctggtaatccgggatcactgtaaatttagacagctccttgcttcctgtggtaagaaaaatgttcccctctgtgccggaaagaagctctgccgccttctccgtgctttccacatagatggcttccctgttcttctccccctccgggcgaaggacacgctgatagcgaatgcttccgttctcacaggcagtccggatattttttgtcacctctgctgcatagggatgagtggcgtccagaacgatctccggcgcttccctccggaaaagctcctccatatcttcggttttcagccttccggcgctgacatggagaaattcattttccttcagaagggagccgccatattccgtggctgcacaggcatagaccggaacatgattttccgcaaggaactcacagagcgcatagccctcggtggtccccgcaaaaacaatggctttatacattcttatatccccttggtgttaccatcttgccgtttacattcttagtctgtgaatttcccacaaatacggtagtaaacatatccacttctgtatcacgaagctccttcagtgtcatgacctgtgcagtctcgccgtcacgtgcaatctgagcaaccgtgccgcagacagtatccggagacttgtatttcatcatcagatcacaggccttctgaagataatccttacgttttctgctggacggattgtaaaggcataccacaaaatccgcctgtgctgctgccagaagccttgcctcgatcttctcccacggagtcagaagatcacttaagctgatcaggcagaagtcatggatcagcggtgcacccagcactgcggcgccgcctgtggctgctgtcacacccgggataatggtcagctccacatccggatagttttctcccacctcatacatcagacctgccatgccatagacaccggcgtcaccactgcagatcatggaaacggtttttcctttttttgcctcgtcaaaagcaagtacacagcggtctacctcttttttcatcggtgtggtcatgaactctttgcctgcaaaatactcctttacaagatccacatacaccgtgtaaccgatgatcacatcactttcatttaatgcacggatcgctcttccagtcatctggtcatacgcacccgggccaattcctacaacataaatcttactcaaaacgtatcctccgatttccggctgcaagggcggtggtcacaccgtcccggcctgttttttttctgatcagtgtaccctgtccgcaacccagaaccgcgcttctctcacagacattctctacacctgttatcttttttacaaattgtgacggggtaaattcaccctgcactgccttcagctcttcctctgtaaaggtcagaaacggaagctgccagacttctgccagggaaagaagtcccacctcttctttcttcagatcgatactggcaatggcactcagcgcttctctgtaaacatccgattctctcagacattcctctgccgccttccggatggaggctgcatcctttcccctgcggcagcccattcccagaactgcagcgggcggcaccacatggactgtatttttaaagggcaggcagcctctgtggatcgtcaccgcaatacctgtttccggtgcctcaccggctatcttacccttctccggatccgctgcagctgagggccttccgtccttcccgcaaagcaccagaccctccggcagctccccgtcccatggaaactcactgtaaaagccaacgctctctcccgcaagaagggccgcagaagcctcctttgcagccttcatatgaaaaatagcacagccattcttttttgcaaaaacatccactgcaaaacggctgtgaagatctgtggctgttgtcacaaccggcaccgccttaagatatccggcacagcgaagagccagctcattggctccgcccagatgtccggaaagaagagcaatgacaaattttccgcattcatcgatcaccagcacagccggatccgtcttttttccggcaatgtaaggtgcgatactgcgcactgcgatcccgcaggcgcccacaaagatcacgccctcttttcctgtccggaactgttcccctgcccactgggaggtggaaacagagatcggatccggaaggtaccggctcttttttgcaagggtgacactctcaccctctttttccagcgccctctgaagcctttcccctgtctccagccctgtcatactgaagcaaatgatggaaatgttcatattttatttcgtagcctcacggaactctgtggtaaagcccggatcatacagcttggatctgtcatagcttgcagcattgaccgcatcacctaccagcataagcgctgtttttgtgatcttgttctcttttgctgtctgggccagagtacccactgtacagataaacttcttctcatcgggccaggttgccttgtagacgatggcagccggtgtatcctcacggtatccgccctccaccagtctgcggctcagctcctccagcatacctgtactgaggaaaataaccatagtcgcattatgagcggcaaaggactgaatactctcttttgccggcaccggtgtccttccttccattcttgtgatgatcacactctgggaaatatccggaagtgtatactccaggttcagtgcagatgcagctccgcagaaggcactgacacccgggcaggaatcataggggattcccttttcatccaggatatccatctgctcacggatcgcaccatagatacatggatcgccggtgtggagacgaacggtcatcttaccttcagcctctgctctctccataacagagatcacttcctcaagggtcatctttgcactgttatggatggtgcacacatccttggaatactccagaagctggggatttacaagagatcccgcatagatgatcacatctgcctcttccagatactgtttacctcttactgtgataagatccggtgctcccggacctgctcctacaaaatgtaccataatttattcctctcttctgtctttgttttctttgataatgatcagggaataatatcctgcatcctcagggatctcctccacggtccggtagatcttttcatccggcattccgcagttttcgatcatcatggcctctgccccctgagaaagaagctccgccttcacatccttcattttctttccggccttcataaggaccttggtaccagaaagcttcagcgcatcctcgatctgataggaagccgggatcacgtgaagaggctctgccttctccacaagtccggtgttcagacgggcggaaactgcacagaaggatgtgatgccacagacgatctccgtctcatagccctgagccacaagtctgtgatggatatagagatatgtggaatacacggtaggatctcccagtgtgagaaataccacatctttcccctggtccaggacagccttgactttatctgctcctgcatcgtgatagcttttcagcacctcaggatccttggacattggaaaaggaactgcaagaagctccttctttccaagctctggataagctccctccacgatcttaaacgctaccgtatcctccggaacctgtcccggaagtgcgatcacctctgcctcctttacaagacgaagtgcttttaaggtaagaagctccggatctcccggtcctacacctacaccatataatttacctgccatatttctttcctcctaactatattttacagacaggataaaacctgtctgttatttatatcaaattttgtccccggatcaaaaatctccatccggatcagggtttcacgcatgaaatatcatccaccccgactgcctgctcctgtatcttatggatcagctcctctgcatcccgggtctgccccagcagtccgtatacattggaaaacaccacagcacccagaaggatctgctcataggatctgtggtccagataaaactggatcttctccatgaccacagccatagtctctttcaggataccatagctgtcaagaacagccagcgcctcatccgtagtccccgcctccaggatctctctggcacattccagagagccccctgcacggatagcacttgcacagagaacctccatccttccatcagcacagtgggaatgggtattcatgatcccggcggcaacctttacaaacttaccgatatgagccacaaaaagaatgccctttacgcccatatcaatggccatgtcaatggtctctcctacataattgctgcacttgatattgttctcaaagggaatagacatatgctctctgagataatccgcaccgtaattccccggtgtcaccaggatatagttttctccctggcagaaatgctgcttcatctccacatggatgctttcgatcagagccttctcactcatgggctctacgatcccgctggttccaagtatggagatcccgccaagaatgccaagacggggattaaaggttttcttcgcgatctcctccccctgagggacggatacggtaagcttcagaccgccctcgtagtcatattcctgggccgcctcttcggcttcccgcaggatcatggctctgggaaccggattgatcgccgcctcgcccacgttctgggaaagtcccggcttggtgacacgccccacaccgatccctccatccaggatgatctgaggccgggatctctctgttttctgctgctgcccagcctgttctgccgctgaaacagaaaactcctccgcttttacatagaccaggatcccgttggtggtatccggatcatcccctgcatccttctgtaccgcacaggagacataggtttcgccccgggtaatatcgtgaagctgtaatgtgagggtgatcccctttggggtatcaagctctacctcggaaagagtctctcccgagagcagcatccggactgcacccctggctgccccggctgcacaggagcctgttgtgtagccataacggaggcgcttgttgttttttatgacatactggtcttccagtccattcttcatatatacgatgccctccttttcagattaccttgtgctccagccatttgcggctgtggaaacgccaggtaaaaatgatcccacgaacagtccagtctgcaaacattccgatccagacacccataggcccgaagcccaggacacggatcaggaaaacacagagacagaacctgcatgcccacatggtacagcaggaggtgatcatggaaaacttcacatcaccggctgcacgaagaccataccccggcacgaacgccattgtccataccacaggctttacgatggtgatccatgtgatcatgtggatgcacatttccgcactggtactctccattccgccaaggatcgtcaccggtctgaccaaaatatacacgatcagacagcttacgataataactacctctgcaatgacgcagagtttttttatgtaatagaccgcctcatccttgcggccggcaccaagacactggcctacgatggtcatcaggcccacacctactccgatggccgcgataccattcaggttctcaaggatattggtcattgcctgcgctgcgatggctgctgttcccagtgtggaaaccgtagactggatggcaagctttccaagctgaaacatactgttctcaattcccgaagggatcccaagtcccaggatccgtccgatcatgctccagtccggacggatcttcaggtaatccttcacaacgacaggctgacgatccttacgcagctgccagagaacaaccactgcacagaaaatacgggaaaccagtgtggagatcgccgctcctgcaacaccaaggtggaaaacccagatcagaaccgcatttccgccaatgttcatgatattggagatcatggagatggtcataggccccttggtattctcctgggcacgaaagatcgaagccgcagaatcataagccgcaataaaggggaatgacagtgccgtgaaaaagaaataggtttccgatgcacgcataacatccgcatccaccgcaccgaagatcagcctcaaaagcggcttctgaaagatcagacagactgcagataccactacagagatcgctgtgatgataaaaagcacctgcctggcagacatattcgccttctcataattcctctgtccgatatactgggcgcagacaatggcgcctcccgctgccagcgccgaaaaagcctggatcagaagcacattgatggaatccaccagcgataccgcagaaagagccgcagatcccacattgctgaccatcatggtatctgcggttcccattatcgaattcaaaatctgttccagcactaccggcaccagaagattacggatcatccggttggtaaacatatgctgctgttccattgttacatcctccgcctcacttatttatgacctgacaaagcagaaaaaaacgtctgtattttatcaatcacactttctctgacattatacccttttcccgctctttttccaatatattttctgtgttttttgtacaaactggaaaatgccgcaggcgcgaaacctgcggcagtctttgtattttgtgttttttattatacaattatgttccaaagtcactcggatcacatcatacttgttaagatgctttttaaagtcggcctccctgcttatctgcaatccagaaaacatctgctcagaatctgcgcctttgctataatacgcagccaacatattagctgcataagattttccgaaccggcgcggccgactattgcagatataagcatttgttgtatcaagaacactgtttgtgtactcgatcaggccagtcttatccacatatattctggagttaagagcaacctgaaatgcactgttgtccgggttcacaaatcttcccatgctattcagactcctttctgaagctgttcctcaagcacgaggttacaactcacctgttttattttgattttatcatttcacagagcaaataacaagttgatggctgttttacttcatgcaacatatgcaagccctgctcgaacagtacgttctttcccagttctgtcaaccattatttcattttgatctcgctgttatacgaacatctgctgatccttcttctgttggggcattcctccaacgcttcatcgctctgtacctccgctgccgctcggctccaacactgatcttatctgccggtgctgtacctggaaaatacacaccctttttgtacggaagatatgaagtaacagaggacctggacaggccaagagcatttgcagttgaaaggacagcagctttatgatcctgtgtttttctgaaatcatcaaaggtcacctgcaccttctccgccatatccgatacatacacaccagccgtgataagcagcttccgaaccttgatcgggttcagacccagctcatcagcaatggcctgcaaagacatcccggcatcataaagcacaacagcagaatccatcagctccttaaggatcttctcggcatcatactccggctttgatttcctgcggccacctccgggctttcttggtttatacgctcttttctcacccatagatcacaaaaccagcgcatacattttgaaggtcatctcgccgccatctgtcagaacatacagttctttcttatcaatactgttatgcagcatttcatcagaaggatggatacccttcttccaatgtggaaacgatggatccccctgctcctggtcgatcagctcccagtacagagattttatgttgtcaaaatcatcttttactgccttacgaaatatcatttgttccaatcctcttactcatgcagctccagcggcaatccgtccgggtcatgaaaaaatgtcatcttcttgccggtaaaatcatccacacggatcggctcacattcgattccgacctccgccaactctttcaccgtctgctccacactctccacacagaaagcaagatgacgcagaccacaagcctccggacggttcacccgcttcggtggatttggttctgcaaaaatctccagctccgtgtgttcatccacacgcagatccagcttccagtccctgcgctctgaacgatagttttctctgatgatggaaaagccaagcttgtttacgtagaaatcctttgcggattcgtagttggatacgatgatggcgatgtggtgtatttttgataggttcatttttgtactccttttttgttttttattttcgttataaactatatagcaggttttaaaatataccgtgtgtgctttggctctgaaagagcatgtgtttcacacacggcattatttttatttcagtctttcactcgcattttagtatatcacaaatctgtgaatattacggtgcggcagagccgccagtccggtgtggcgagagccacctgtccggactaacggagccacctcagtttgtttattaagttactttgccattgttggatccagtccatatacttctctcatagagaggtctttagctgggtcaacactttcaatatcgatcttataggaatcatacgatatacgatccatgatggcatcggcaagagtactttcaccatcgcagatttgctggtaccattcactttcacggaactgagaacaaaagattgttgaagattttttacgtcttttatgtatcagttcaaaaagatttctggcttcagcttcggtcagtttaagaagcagccactcatcaagaatcagtactattggcttggtatatttcttcaggacattcgagaaagttccattgtccctggcagcctgtaagtccaataatagatcaggaagtcgtacataccgtactgagtaatagtgcttgcatgcttccatgccaaaggcacaggccatataagttttaccacttccggttgctccagtaataaagatgttcctgtattctgtaatgtattcacaggttgccagacggttgatcagtgctttgttcagctttcgtccagaatggtaatcgatcgctgcgatgctggcatctggctgttcaaactcagcctggcggatcagccttttcagacgattgtttttacggttgctatactcgacatcaacaagcataccgaagcgatcttcgaatggaacttccttcattgcaggatcatccatctggatgcggaatgcatctgccatagcagtcagacgcatttcaataagtttatcgattgtaccttgatttgtcatgattgtttacctccatagtatctggctcccctggttatgccgtgtggtttttctacttgagatgattctgattcggtatcaggtgcatcctttgttgcaaccaatagatttttgatacttttatagctaggtttaccggaataagagagcgccttagcgcagacctgttccagcttttctggcgaatatttttctgccagtttcagtaatcccatgcagcttctgtaggattgttgttcaatcctgccggaggtaagtattgcatcgacaaccttacttgtgttaattccaagcgaatcagcccacttacggaaccggtcaccgttccattccagatatttctggtgttcctgcggcatatgttctgtcactgtagaatactgaccgcttcttccatagagtcgtctgtgagaggcaatacgattgtgattataaaatatttcaaccgttgtatctgttatacgcacatcaaccttatttttgatatactgataaggcacggagtagaacattctgtctactgcgatgtgatagttaaactggacggtggcttgtttccactcagccagttcaaaaggtgtagcaggcaacggagccagtaatggcatttcttccccaagaaataaactgagtctgctacattcctttttctggaatttacgggcgttgtaggcatccagtttttcacggattgaagcattcaattctgcaagagagaaaaactgttcattgcgaagggctgctgttatccatgtggatatctttcctaccgatccctctacattcggtttatctttgggtttccggactctggccggaaggatggcaagattgtaatgttctgccatctcatgataagttgtgtttaaagcagtgttgtaccagtcactctttttatgattcactgcggttgtgcagttatcagaaacaagcataggtgtgacaccgccaaagaaatcaaacatctggacatgagctttgatccagttgtcggttttctcattcatatatgcttttacaaaagcatactgactgtaagttaatacacctacaaatatccatgcatctgttatttctccggtgtccggatcaatgatgtgggcagggtcaccggcccagtcaacttcaatctgttcacctggttttctggggatatgcatggtagccctgcgtttttcttcatccttctggatgtagtagcagaactgagaatacattagaggctcttcgctgctcatgcggcactcctcacagtattctacccagagaagttttttgtttacgccgttccgcagaagttctttgcggatgtagtcaaagtttggcatgcgtttattcgttgccgacttatccttaggaaacatcagctcctctagtgcgctgtcggtcatgtcgaaatccagcggccatgaaagcttgatttccgctgccttttttaaaaccttagcgactgtgtttctggatacaccgcaactctgtgcgatgttcctctcactgaatcctaagcttttcaagcgtaggatttcacgatacttggtcataacttacgacctcctttatctgtattcacaccaaaggtgtgtatttacagtataaaggaaatatatgtaatagagcccaataaggtggctctgaattaccggaatatatggctctcattctccggaatggtggctctcaaagtccggacaggtggctcaaagagccccggaataatcatctgcaaataaatcagccttgtacacgtattttttactccactgtaacactctttgcaagatttctcggcttatcgacatccagaccctttgcaacagaaacataatagcccagaagctgcagaggaatcactgccagactgccataaaatgctcatctaccttcggtacatacacagtgaagttcacctgatcctcaatctcctagagtctattttcagaaaccctttgcttcacagaaaaaaggattcgggtgaatccttctgcaatacgccgcatcataactgttttagtatctacaaaagtttctgaatgtagcagagttaaaatcttctggcatatatatattaagattgaaagtcgattatcgttgaatatggtacgattctgttaagcccaggaataaatctaaggtgtagatcaaaggaactctccaaaagttgctactgattcttgatttgttctggtcataagcattacctcattaatatcatgtttttacagtaaacaagaagaaatgcattagtcactacacaaggttttgaggcacttatatatttacatggaattcctctcaatttcataataaatatctttttcgtataggttccaagaataatttatgaatttcgaatgtaataaaaagcgccattatagtaatcaggacaattactacatcatttttcaataatgtaccgactattatacatcccttcaaaattggcataggtggataatgcaaaatcataatatccatagaagattttccaatttcacttaaaactttaatgtttcttggtagcattaaacaagtttctaataaaaataatgtccccgttaaaccagtaataataaaaattactaaagaatcaaaagtatatgtatgcatattaacagtattttgtgttatgctttgcactataaaaaaacataaccctgatatcataaaaaaggcttttttatactgacatatacttttccaatttagtcctattaaatatcccattgactcaaatattgtagctagaaacactctggcaactgatattattggatagcatataatcgggctttgtatattttttacaagcacttttaaagctaatgctaataccaagcaaataagaatcaataatatttgtctctttacttttgaagtaatgaagttttctattcttttttcatattcagaaagaaagatcttagttacaaacagtgttgcaagaaaccaaagtggtgcaattccacgacatgttattgttgcatatactctttccaataatgaaaccttgttttgtattgcaaacaaaattatatatacaaagctccagaaaaaataaggaatcagaagttttttagctgttttgactatattacattgtaaatttctttgtaaaccagaaataataccacttgctatgaaaaaaagtggcatatgaaaagaataaataaatctagccaaaattacatactttgtagataacgcattctgaagtaaaatagtgtgtcctaataccactaaaaaaattcctattccttttaaataatctaactcaataattcttgcctttttgttcatttattatttttccctgcatcttaaatcgatgttttcatcgaatcaatcatttttttgaacatttcttcaaggccatataaaggcttccatccgagtttcctgatttttgacgtatccagattcatatggagaactggcgcatatcccaaattttcattcatattttctttaattcttactgaaatattgttatgcgcacatttttgagcaactaacagtgccatttcataaatagaacaatacgtatcttcatttgccacattatatgcctcgccagcaattccctctttcaaaatagtcaaaatagcttttgctgcatcttctgtatacaaatagctccgcttagtttcacctttagtattaagaataatatcttttttctctataacgcatcttgcaaattcagcaaaaactcttccatcatcatatcttacaccgggtccaaaagtttgcgtaagcctaattacctttgctggcacattatattctgatgcataagatacacataaattttcacacatccttttgctttcaggataacatgagcgaactttcattgtatctatatttgtattgtaattttcaaatattttgtcatcagttgttggtgctccgtatacctccatacttgatagatatacaaatccctcaaccgagctaagtcttgacataaataccctttataacagtataaaatgcatgtgccgcaaataaaataaatattaatcctgaactttctttatatttgggtaaaatccattcaataatgaactttaatggaaatgcgcctccaataatcaaacaaccccaaattaatacaaattttttgatttttttgatattatctatattcgtttctctacaaaaatagttatacatggatacagtaattggtgtaataaagacattgataatctgttcaacacttaccgcaaatgaatattgtgcaaaataaaatgaattcatcaatatttttacaaaccaacgatccattcctgtaaatatagaacttgaaaaattccctaacatcaaaataaatccttgcctgatattaattattatttccgaaatagagaattttccaccttttaatatcccagtttttctactgactccataacataaaatgacagctataattatacttgccaaaacttgaacgcttaaatagagtttataattatctgtattacacagaaaaatgagcaaaagatcaaatatcaagactagaattttttcataatttaatgcttttccatataaattatactccccaattgcctgggcgaaacttttaaaatatcctatgaaatttgtagcaaatactccaaccgcaaaagcatacagtatgaaactctttcttattccaccaaatattgctaaaccaattgatgcaatcaatagtacaaaaatataattcaaaaaatttgtacttaaatccttttttgatatattttctattttttttccaccatattttaagtacattccatcattgtatcctaaatggaaaaaaccggcataagaaatatatgagcgaatcctcggtatagtctatatcataaattttgcttatacgaagccatgtatcccaatcctgtgacgctaccattttagggtcaaatcccccaaccttctcaagtgcttcgcttttcagcagaggaaatgaacaggagcctataaaattatcgcacgagagctgcttatatacagatcccctatacggtgtatgtcgatcaaatacgcatctggtgcctccatctccttcatgaatggtcgcattgcaataaaccagtccgatattatttttggactttctaaacacatccaactgcttttcgattttatctttcacccattcatcatcgtcatcaagaaaagcgatatacttgccgttgctattagagaatcctgtatttcgagctgcacaagcacccatatttttttcatgctgaatatatttaaccctggaatccgatatattttcgcagtaattttttacttcatctcgatattcatattcatttgggctaatgatattcttgctgttgaacttttctcttacacttgccgtatagcccacaggaatcgtggacttgataaccataatggcgtttgggttatattccatgaccaacttgattacagcttcaaccgcagacgtatcaaagtgctgggtcttgctgtcatagttagtaggagccgcaatcacaacaaaatccgcatcgctatatgctgcctttgcatccagcgttgcggtcaaattcaagtccttttctgccaagtatttttcaatataatcatcttgaatcggagatttcttgttattgatcatatcgaccttagcctgcacaatatcgactgcaactacctgatgatgctggctcagaagcactcccagcgaaagccctacgtatcccgtgccagctacagcgattttataatttctcatagttctattctccttcactattttttgattttataaaaaacaaacaagcccacggcggattactcaatggcaatccaccgtaggctcgattcgttctccttaatattttacttgctgctcattttgtgggtcaaaacagagctgcaccaaagcctcccacctataacctctggatttcagcttctccgcagcctgtcagcaaataaatacttttgttggacgagtcgagccgttgaaaccctttatttatcgtggtttttcttggttgaccctattatatctctagccccctttttttcaatagtgggaactgttttcagttttatccccttatattggtttttaatttttgcatcatattctgcgccgcttacatgatgtccagctctgttgtaacaaacaactgtatgtccgtctctcaccagacgggtacacagttcttccacaacaatttccacgccaccctcccgactaggtattctcttatgtccaaacattgctatccgcagcggctctttaatcttttttcctctcaatactttccatccttacagaagatgcccgcatcttcttactaatatttttcgttcacattcttataacttcgaatacacctcataccacaaagggcacagttcttcggcgacgcctgcgttgggccgcctggcggtattcaaccggaaaggaggcgtcactggcgcttcctctcttgctgattgctcagcatttatatataagaggcatttctgccgcttattaacttggtttgttgtttttccggaagctttcctggcatttgcggcccagatttcgggcgccgttcaggaagcggttgacctgatggccgttctggcagatgaatatgctgccctgtttttttccggtggctccgcagatggaacattgcttttctgttccgtcggcgcgcagctcaagtaccaggattccttctgcccaggctttgtatttcagataattccggatgcggatacttaagtgaaggggcgaataattgccacttctgtacatggatatcctggaaaaatcttcatcatactccggcagtaccagtatcccggtgtgattttccttgcagaaatccatgatctccttgctgacctgatgtgcataatgttcattcaggtgcttgagatgcatgtaatatttcctgtttggctgactgacgttgtctttatcggtaaatgccctggatgcttctacttttttcatcaaagctttgcaatgatgtcggtatgcatttccacctctgcagttttttacagccagctgcctggattcttcatccagaactgtgcatactgcaaagctgtccgtattggtaaagcggacgctgcatactctggcgccttcctgcattcgttcctttgctgtccgggcatcggagttctcctgcttgacaggtacatggaacatgagccatttttcctcatggaccagtgttggtgaaaggatcgccgcttcctttgggaagggacgtcctgtaagtccgcagggtacccagatccatttctttccgttccagagcttcagcactacggaggtgtctgtcaggtctttgtacattcccttgaaaaaggtgatgttggcatctatcttttcggggaagctttctgcacttgctgcggtctttactgccattgcagctttgttcatggcagatctccgaaagtaaacggggagctttcctcctggcgggatgtactttggttctcttccgtctcttccgggaacagtgagtttttccagatgtccctggatggtcagcagattttcggcccagagctcttcgctttctttcaggagctcatagtaaaaggctacggcttcccgatacagggcttctgttgtttcgatcatctgcttttctggacaaaagagccgcattttccatgttttgatactgtatcctgttttcatggcatctctttctgctgtcaggtatcgcttaatatcttcattagcgaaaaagagcttgaaacactgttaaatgctgcttttttcggcacagttgaccacgattttgaccactaataattggaaagaaaagaggaaaatacctgaaaagtattgattttacgcggatttgcgcaagaaaaaagtgaccacttttagtgaccactaatgttagatttcgatgattatcagactgtttatttactttttgatagaaaacgactgcatatgatgcttaaaaaacgacattattagcatgcttcatgtctttggcacgccttgacaaaggaaaatatcaatggtatccttacatatggctgtaaaatatatcttttttggtctgtgactaatgaagataataagcgacacaaatcccataatccacgagctgtccaaggatgtttcctcttgtaccagctctttttttatgtctaatcgacatttccatgcccaaatgctatactatacccgcaggccgcctgatctggcttttggcctgctaaatttcagaaaaggatttttttctatggagagaattattacctatacgatctcaaccggggattccggggaaaatgttcttggatttcttcggaagaagggtttttccaaacatatattgactactatgaagcgggcggagcaggcgatcctgctgaacgggcagccggcttttggcagaacggtcctgagggagggggatgttcttcggatccttgttccggaagagaccggggacggaacggagccttccattattccggtgccgctgcctttggatatcctgtatgaggatgaggatatccttgtgctgaacaagcctgctgatatgcctgtgcatccgtctgcggggaactacgagaatacgcttgccaacggtgttgcctggtattataagcagcagggaaaaacttttgtctaccgctgcatcaaccggctggacagggataccaccggggtgctggtgctggccaagaaccctctgagcggggctcttctctctgcccagatgaagcagcgccagatccgacgtacgtatcttgcacttactgacgggatcccgccggaaagggggacgatctccgctcctgttgcgagaatggatgcttctgtgatcacaagggaggttaattttgagcgtggggaagctgccgtgactcattatgagcgtcttgcagtcagcaatggatatgctcttgtggagctacatctggatacggggcggactcatcagatccgggtgcatatgaagtatatcggctgtccgctgccgggggattttctgtatcatccggtttttgaccggatcggacgccaggccctgcattccttccagctggaatttgctcaccccatcaccggggagcctatgtgtttcctggcacctgtgcctgaggatttccgcagagcatttttacagtaaaaaaatcagctgtccggtaggtatttcctgcaccggcagctgatttttttgtttttatttattttttttgtagatcacaaggagtcccttgagcagaaggtcctcatccagaatgatttctttcttacagtgagaaatgatcttttttgcaagaccgcctgttgcgatcacggttgttttctcaccaagctcttcttccacccggtctatgatcccgtcgatggctgctgcgttgctgtagagcacgccgcttttcatgcattcgatggtattgcgcccgatcacatgctttggggcatcgatgctgatcccgctgagctgggatgctctggctgtcagtgcatccagggatattccgatgccaggaaggatcattccgccaatgtattgctttctgctgttgacaaccgaaactgtagtagcggttcccatatcgatcacaataaacggaaccggatattcatttaatcctgccacagcgtctgccacaagatccgcgcccagctgtccggggttatccatcatgatgttcagacctgtttttactccgggtcccaggaccatgacttcttttttgaggatcttttctgctgccagcttggcaatgttggtgatctgcgggactacagatgaaatgatacagccttctatgtctgcctttttgatgtggtagatttccagtaaggttttcaggtctacggcatattccagttctgtttttgttcttacggtagcaagtctctcgatgaagtatgttttctgatcatcgatgcagcccacgactatgttggtatttccaatatcaattgctaatatcataattttattttccctgtctttatgcttttgtcttctcacggctgatctgtgcggatgggatcagatgtgccttggaaagtgcagctcccactgctcctgtgatcactgtggaggaaatcatttcgcatactgcgttgatccctaccatgagacaacagccgatgatgatgttatgaccgcccatcagattttttacataatcggtatttccgaacagtcctacaagcgctgacatgaagaacagggtattcaggaatgcggaaaagaatccggttactgcacatgccacataggtattgctgacctttcgcatgcctttaaaaatatatccgagacagataccgtccagaagacgtgggatgaatcgctggataaaggcaaataccggattgataccgaaaagcacaactcccattgcactggagccgcctactcctatgcactggagaaagctggtcaggccgaagatcgcacctgccacggctcctcctacgggtccgaggacgactgcactgatggctaccgggatcacgttaaaggaaatggccagtggcccgatgttcagatatcccagtggtgtgtaggccatcagcagaaggatcgctgccatcaggcccagtaatgtaagctgtgctgttgtaaatttgttgtttttcattttttctcctccttgttaccgttccgctctgtgaatatttccggaaatacagcatttcccggcgttttctgcggatacaatacggtgatggaaagcggtgatctttttgttccgcttttcgttgttaaaaccggctctctgaccggctctgtagctatgcttctgcctttgtggtaagcagaaggatcttatccaggatctttaacgctgcatcctccttgctcataagcgggagtgacacttcttcatcctgtgtgatcagagtcaggacattggtatctccctggaatccggcaccttctaccttcaggttgttggctgccaccatatccaggtttttcttctcaagcttggctctggaattacggatcatgtctctggtctccatggaaaatccgcagaggaactggccctgctttttgtgctggcccagatatttcagaatgtcatctgtcctctccagctctataaaagcctgatcgtcttttttcttgactttgtcttcgctgacctgcttcggacggtagtctgccactgcggcagccttgatgatgatgtcctgttcatcacttaagccggtgactgcttcaaacatatctctggcggatgtcacaggtacgaccttcacaaaaaggggcggctcaatagcagtaggcccgcttaccagcgtaacctccgctcctctgagcatggccatttttgcaatggcgtatcccatctttccggatgaatggttggtgagacagcggaccgggtcgatggcctcctgggtaggtccggccgttaccaagagctttttgccggcaaggtctttttggaaggcggcttccttcaggatatattccagaagagtttccggctccggcatttttccggctccggtgtctccgcatgccaggtagccgctggctggtgtgatcacctcatatccgtagtttttcagcttccggatattgtcctgtaccacgggattctcatacatagcggtattcatggccggtgcaagaattttctgacacctgcaggccattaccgtagtggtgagcatatcgtccgcaaggccattggccaactttccgatcacgtttgcactggctggtgcgatcatcacaacatctgccttcttggcaatggatacgtgctctacctggaactgaaagttccggtcaaaggtatctaccaggcatttattcccggtcagtgtttcaaatgtgatcggattgataaagttcgttgcattctctgtcatcagtacatgaacatctgcatgaagcttatgtaatgcacttgccagatatgcgatcttgtacgcagcaatacttcctgtgatgccaagaagcactgttttccctttcagcatccttctccctcctgtcagtcaaccatacggatactctcgatcaccggctgctgatcctttgcaatggttccgttgccgtctgtcggcttggcatccttgcagatctgatctacaatgtccatcccggaggtcacgtgtccgaatgcagcatagtcgccatccagatgtgtggaatcggactgtacgataaagaactgggagcttgcgctgtccggatctgtgctgcgggccatggaaatggttcctcttacatgagaaatatcgttcttcactccattgctggaaaattcgcccttgatggtgtcctctgctccgccggttccgtctccgtttggatctccgccctggatcataaatccgtcaatgatccggtggaaggtcagaccgtcataaaaattgtcctgtaccagctttacaaaatttgtgactgtgatgggtgcagtgtctgcatccagctctacatcgatctcaccatagtcctttacggtgatggcagcatgatgggttcctgtcagctgctggctggtatcgatcacagttgttcctgccatttgtgcatcctcggaaccatcggaaaattctccgtctgcgctgtctgtatcctctgtactgtctgcggaactgtctgcagaagcttcggtttcatgtgaagtgtcccctgcattaccggaagcctcctgatcatcggcgctttcttcatggtctgaaaagcctgccgcctcagcctcctcctcggatactgcattggctgctgtctcttcatctacgcctgtctgtccttctgaggtttctttctccagagattcttccttcttgtctgttttgtcagaagtactgtctgtgcttccgcatccggaaagcattcctgcggtaagagctgtcgcaaataatacggctaaaaccttacgtttcatatttataagtcctccttatcagatcccgaaaacgcctgtttcggcattttcaggtgagcttttcactctccccctgtaagcttttctcagtttaacatcatcttttcataaagtcaactttgcacggaaccaggtgcaggattccctttgttttgccttgtatctcttccggttctctgctaaaatcatgtatggagcttattatgggctccgtacatataagaaagtgaggaatcaacatggaaaagatcacaagttttaccattgaccatatcaagcttcagcctggcgtatacgtttcacgtaaggatccggttggagatcagatgatcactaccttcgatatccgtatgacttctcccaatgaggagcctgttatgaacacagccgagcttcacgccatggagcatctggcagctaccttcctgcggaaccataaggagtttggcccgaaggtcatttactggggtcctatgggctgccgtaccggaaattatcttcttcttaacggggattatgaatccagagatatcgttccgctgatgatcgagatgtttgaatttatccgcgattttgagggtgagatcccgggagcttctcccaaggactgcggaaattatctggatatgaaccttggcatggcaaaatatctggcaaagaaattcctgaacgaagttctctacgatatcaagccggaccgtcttgtttatccggaatgatctgcgggtacgatccgctggcatgatccttgtgttctgaacggactggactatatgccgaaacaaaaaaacaggctgcctgtatcgatgtatttcatcagatacagctgcctgttttttattatatcaagcagatatctgcaattgaagcaggatcaggatttccctgatctggtcaaagcctgtagtctgtgctctactgtgctgcttctgcggtagtatcttctgcggtagtatctgccgccactgctcctaccggtggtgttgtgctgacatagtcaccggatgcgtagcaggtctggccattataatccacacgaatccatccattgtcacagacaccggtacacttcagggattctccggaaaggacacctgccacaaactctgcctctgcattggcgtcagaacgtaaattcacaccctccactgcatagtaggtggcatcctgagcctgtacgttgatgccgcttggggtctgctccgtagctgctgtctgtgctgcgggatctgctgccccggctgtggtagagtctgccgccgctgctgctccgtctgctgtggaatctgctgctgccttcggtgtaggtgttgcagttgccttcggcttctctgtgggctccggcgtcggtgtggaatctactactgttaccactgcatcggttccttcctcatatccacagccctgtgcaaggaaagccgcgcctattatcaaagccataatacattttttcttcattttatctgattcctccttatacgccggtaaaaaattctctgcgtccaatatacacgattctgcaatattatgcaagtcctggccggtcctttcacatatttaccggctcaaaaagcacccggacagttccgccgcagatcattcccagatctcctgccccctgtcccagctcgtaaacctttgtttccgtatttcggatatttactgcgtgttttccggcttcaaactccacttttccgccgccgatgcttcctgccgtgcttccgtcccggaatacgaacatcttgctcccggttcctcttggtgaggatcctttcttctcgatgatcgtgaccatggttcctggtgtcctacggcgtactgctgcctccaccgcctcatcacagtaggtgcggaaatgccggttcttttcctgcacgatctctgccatgatgctcacggcaatctcagccggcatctgtcctccgatgggaagtccgatgggggcatggatctgatccagctgttcctccgtaaagccctctttcaggagcttttccctggtgatccgcacctttgtcctgcttccgatcattccgaaatatgcaaagggtctcttaaggatcgctcttgcacaggcagaatctcccagatggcctcgtgtcaccactacatagtaggcattttcatagggagggatcctgtcggacagggtatcaaactctccaaagatcctctcatctgccatgggaaatctttcatccgtcacaaattcctcccgatcatccatgactgttacatgaaagcccagcatcctgccgatctctgctaccggaagagaaacatggccgccacccagtatgatcagcctgggattcttctcgtaggtttccacaaatatctcccggtctccgtttttcacaacgccggtttccacagctgcttccacggaagctttcaggaattcttctgcttctttatttctttctgctctcttcggataaaaaaagctgctttcttccaaaagatatttcagcccggcatcctctccgttcaggaggattcctgtttttacacgccctcttttttctaccacatcatatattgtctgatacattctctgtgtcctttctgtccgtctttcgctgtttattccgcggcaagctcctttaccgccccggcagcagtgtccacctcttcttccgtattaaaataagaaaagctaaagcggacagctcctgttttttcggttcccagtgctttgtgcatcagcggtgcacagtggccgccggctcttacactgatcccgtactcttcatcaaggatcatggccacctctgccgaatccatctctgcaatattcagagtcaccacaggggagcgttcttccctggaaaaatccccgtacagggtgactcccggaatttcctttacctggtcataaaaacgccacatcagctgctgctctctttttcggatctgttctgttccaatttcggtaatccagctgatggctgcgccaagacctgcgatcccgtggctgttcagggtgcctgcctccagtgtctccggcatatcctgcggatgctctctctgaaaggtgaggacgccgcttccgcctaccttcagaggctccacagatacccccggccggacacagatggctcctgtgccctggggtcccataaggcccttatgtccggaaaagcaaagaatatctatatgatcttttttcatggaaatcggaaatactcctgctgtctgggcagcatccacaataaaaagcttctggtgcttctgtgcgatctcaccgatggcatggatatcattgagatttcctgtcagattggaagcgtgggtacagacgatcaccttcgtctccggacggatggctgcttcaagctccgtaagggagatccgtcccttgcggtctgccggcaagatcgtaagcttcatgccctttttttccaggcggtacaacggacggagcacactgttgtgatccatctccgtacagatcgcatggatagttccctcctctggatgaagtgttccctgcagggcgatattgagcgcttccgtgtcattggatgtaaaggccacacattccggtccccatacgtcaaacatctctgcgatctggcatcttgtattaaaaataagccttgaggctgccattgcttcgccgctgctgccccttccgctgtttcctgcatgctgcatggcttccaccacagcacgcggcacacagtccggcttatgaaagcttgtagccgcgttatccagataaatcatttcatcctccttgtgatttttatcaaatacctttataataaactctggctttattttatactatccgaggaggttttccaatgaaaaaaacatcttttttcaacagtctgccatttaagctgctggtcgctgtgatcctggggatcatagccgggcttatcctgaaccggtacagcaccaacggaatctccatggcagttcttaatatcacagttactatcaagtacattctgggccagctcattaccttctgcgtgccgctgatcgtgctgggatttatcgctccgtccattaccaggcttggcaaaaatgcttcgctgatgctgggtgttgcggttgtcctcgcttacggctcctctgttggcgcagcgcttttttccacagcctccggctttctcatcattccacatctgtccatccattcctatgctgcaggactgaagcggctgccggaggtgatctttgagctggagatcccgcagatcatgtccgttatgagtgctcttgtttttgcaatgatgctgggacttgccgccacctggacaaaggcgaagctgatcactgggctcctggatgaatttcagaaaatcgttctttctctggtggctcggatcatcatccccattcttccgttatttatcggcactaccttctgcggccttgcctacgagggaaccatcaccagacagctgcctgtttttctgaagatcatcgtactggtgcttgccgggcattttatctggatggctcttctttacatccttgcaggaatctattccggagaaaatcctctggaggttgtccgccattatggtcctgcctatctgactgccgtagggaccatgtcctctgcagccacactggccgttgcactgcagtgtgcctccaaggcaaaaccgctccgcaaggatctggtcagcttcgggattcctctttttgcaaacatccatctatgtggctccgttctgacagaggttttcttctgtatggcgatttcgaagatcctgtacggttccgttccaacgccgggtaccatggttctgttctgccttcttctgggtatctttgccatcggagctcccggtgttcccggaggaactgtcatggcatcccttggcatcatcaccgggatactgaaattcgacagctccggtactgcactgatgcttaccatctttgcactgcaggacagcttcggaactgcatgcaacgtgaccggcgacggtgcactgacactgatgcttaccggctatgcaaaacgccatcatattgaggagcagcagcttgatgtggaattgtaagttcggagctaagtcaggcggatatttgcgatccgcttcgttgcttgctcataaccggatatcaagcgaatatcaaccaaatatcaaaaatgccgcaggcttcaaaatggctctgcggcatttctgtgtatttctatctgcttctgtaagtttctattgtttctatatgcttttgttgtttctatatgtttttctgtttacgggcggatcacttttcctgcttttgtgagcttttccgctatggtatacatatttgttacggttcccactgccggttccttcagtccgtagaagttcacgcaggttccgcaggtcaggatctcggttccctgctcctgtaaggtcttaaggtcttcgatacatggtgaatcctgtgcggtaagtctggctccgccattataaaacagcataactgacggcggtgtctccagctgtgtcagcgcatacacaaatcccttgagcaggatcccgccaagctccggatctccatctcccatcttatcggaagtgatggcaacggtataatctccctgcggaacagccggtgtgcagacgatctcaggctctgtctggcttcttgcagcaggatcagattttactgtcatattgatctcgtaaccaccttctgtttttctggatacgaaactacatccgatacttccggcaagtctgctcaaattgtttactgctgtttcattatctaccaggatcaagatctcgtctccctgctctgccttgtcaaggatcttcttggtcatcacaaccgggatcggacactgtttccccattgcatctactgtgtgcttcatactcactcctcctgtattctgtgattttttataattgctgttttatcattattgctttttcgctgttttcttttctttgatcttttatttctgctccagctcatgggcctgtttgaagatctcacaggcgcctgtgtttacacatctttcatgcgcgcagtccataaaggtcagcttcctgctgctgtcctcctgccgtgtatactcacagcagacggtttcgcccccgttcatggtacggcagaaaccggatataaattcctcttcgatctccattcctatccctccgtcggattctcagtaatctgggcaggtgtgatctcctccagcattcctgtttcattgtaggcttcaaactgttcctcgatctttccaaggatatctgcatactgacagaaggcctccgcaagctcatccctatgttccggaagcttcttgtaacagacacggtgctccatgcttgcccagagatccatggtcatcgtcctcagctggatctccaccggaaaatactccatggtatccagataatacaccggaactgcaatgatcacgtgaaagctgcggtatccattaggctttggattctgtatgtaatccttttccctgataaagatcagctcactctgccgcttcagcgcatttacaagattgtatatatcatcaataaagtagcagatcacacggatcccggcgatatcccggagatgatccttggcgttctgcacactgtccgaatgtcccagcttctccagcttcttttcgatgctcttcttggatttgatccgttcctggatattgtggatcggagatacggaagacttctgatacaggcttccgttgagcacctcaagcttggcgcgcatgatctgacatgcgttctgatatggctggatacaatcgtaatactgttcgtttgtcatgaaaaaccctctttcgcgtttgctcagaatatacttgtatcttaccggacaaatgtgagcaatctgtagtgatttcctaagattttcctgaccattttattaaaaatccataaagcctcctgcatcagtctgaaagcttatggataaaaagaccactgcggagcttcggttcaaaccaggtgctctttggcggcataagcttaccctcgtctgcgatcgtcatcagctcctccatagatgtaggatacatggcaaaggcagctcctcctgtctcatctgcagctgctgccagatccttcagccggtggtttcctcccataaagcggatcctctcatcggtacgcgggtcactgatccccagaaccggacccaggaccttatcctgaagaatagatacatccagctgacctacgctgtctttacccgcatagatatccggatatgccttcagatggaaccattctccgtctacatacagcccaaagcagtgtttctccaccggtttacatggaaatcccggcattgccatcagctcaaaattaaacttcatgcttccgataaaggctttgggttccatacccttgatatcctttacgatcctgtgatacggaaggatggtcagctggtcatacggaaataccaccgacaggaaaaagttaaattcttcttttccggtgtagtccggatgctccgctcttctcttctgtccaacctttactgcggaggctgctctgtggtggccatctgcaatatagatagaggagatcccgccaaaaagactatgtatagtccggatcttttcttcctcatctacgacccatacacgatgtgtgatctcatcatcggaagtaaaatcatacacaggagcatgtgcatttttccattcttccataagagtaagaagctctgccggatatctgcacgccagaaaaatagggcctgtgttggcatcacagacatccacatgacggatgcggtcctgctccttatcctctcttgtaagctcatgctttttgatcacaccattcatgtaatcatcaatggagctgacacctacgatcccggtctgggatcttcccttacggatcagttcatacagataatagttcggtttctcatcctggatcaggatcccttctttctggaaacgatccagattttcccttgccttctgataaaccatcggatcataaagatcggtttccggatccagatccatctctgcacggtctatatggagaaaagattccggatttttttccccgatctctcgcgcttcctctctgctgactacgtcatagggaagtgcagccaccttttctgctttttctgaagcaggtcttactgcccgaaatgcctgaaataaagccattatgttttcctctcattcctgtccggctatacgccggcccttcttaagatttctgcttagtttgcagaaaaatcatcctgtccattctaacacatatcaaaatttcccgcaaacctttatccggcccgtcttataccttacgtttgttcagctccggcaataccgtcgccagcatggtaaaaaagcatgcacagccgcctacaaggttggaaaccggttccgcccagaacacgccgtctgttcccaggccattcacatgaggcagcaggatcgtcagcggtactacgatcactacctttcggaacagagaaaaaaaggtggccttttttgcctttcccagtgccacgaacacgctttgtccggtaaactgcaatgccataaagcagaagccgaaaaagtaaatatgaagggcgggaactcccttttccagaagcccgggatcgctgttaaagatccggataaaaaattccggaagcagcttcaggattccccagcctgccagggtatagatcacacagacagctgtaataaatttaattgcttttttgactctgtcgtatgctttttctccataattaaaactcatgaccggggaggctcctgtagtaagtccatggaccggcatggtgaaaatgtcacggacagaatttaaaactgtcatgacaccaacgtagatatcaccaccccaggtctggagtgtggcattgcataccacctgcacaagactgtttgtaaatgccataaaaaaaccggacatacccaggcttacgatactgcccactcttttccaggaaatcctcatggcgctttttttcaggttcaggatcgccttttttcctgtaaggaagcgtaagacccagatggcggaacagaactgggaaatgatagtcgccaaagccgctccccggactcccatgtgcatcccaaagataaacaggggatccagaaggatgttcagtacagcaccgatcagtatcgtgagcatccctgtgtttccaaagccctggctgttgataaacgggttcattcccagagtgatcatcacaaacagggttcccagaagatagatccttatgtagtctgccgcataggaaaaggttacatcactggcgccaaacacatagaggatcggtctgtaaaagataaggccaatggctgttaggatcactcctgtgccgatcagcatcacaaaggtgtttcccatgagcatttctgcttcttcccggtttcctcttccccgttccatggagcaaagcggtgctcctccatttccaaaaagataggtaaatgcggtgatcagggtgataataggaaaacacagtcccactcctgtcagtgcagtggctccgatctcaggaatccttccgatatagatccggtctacaatgttgtaaaggaggttcaggatctgtgcaatgatcatcggcacagccacttccataatgttacgatagacatttcctgttgaaaagtctgtctgatgtatctgcatttctttacaccttcctgctatttcttatttaattaatatactatatccggcgtccaaagtaaactttgcgttgctgttctcttcgtgagctactgttcactccgttctcagtaatactttgttatctgtgtatttatttcttgctatttttgtctaaaaaagttataataaagccataaaaacggtaatgatttcacgtaaaaccggtcaaaaaaacacattactgggaatctgttccgcatggaggtatttttatggataataattataagggcatggctgtaggtgtttttgagctggataacctggttgcctgttttgttgctcttgatgctgcttccaaagcagccaatgtcaggatccaaagtgttgagcgtaaccgtctgaagagtggcgcctgtgtcaagatgcgtggttctgtttctgacgttaatgcagctatggaggttgcgctggaggcagccaaacctcttggtaaggttgtttctcatactgtgatcgcttctccttctgaggatactgagatcgcactgaagatgacgatcaataaataaaggggggcgacggatttatgaattatggtgcttttggtttagttgaggttgttggcagcagtaatgcgatcctggtgatcgaccagatgctgaagacttctgatgtttctttccttacctggcagacgaagtgtggtggtcatgccactgtttttctgactggtgatgtttctgctgttacggctgccgttgacagtgtaaaagggaatccgccttgtgagatcgtagcttcagcagtgatctccaatccttccggtgagacggttcgtctggctgaggaagaagcggctaagaatcattttatgtaggaaatatctatttgtatatttaatatttaacaaacgtacgcagggaaccgccctggcgtagcgggaagggcttcgtcgtccgctggcttctaaggtgctgcggcttctgctaaaaccattccaaaaagttctgaactcgcgtccagacgctcagacagcagaactttttggaataacgcagaaaccacaccacctaagaatcagcaggactcctgcagaacatcccactacgctagggcggttccctgctggcttttgtatgcatgaaattgcctcagacacggtgctttcgtcattgatgctctgcttctacaaacttcacactttcactctagcctatctcccctttcgcatgtcagcaactcttttcgctatattctttaaactcacgccttcactctagcactccactccttcgcacgtcagccggcgaggtagcgtctggtttgggctggctctgcaggaggggtgcgcttcttaggcggtgggaatctgcgttgctggaaaaaatccagctgtttgagcgacgcaggagcgagttctggatttttttcagcggttttagcagatttccagcgccttagaagccagcccccgacgaagccccagcccaaaccagacggtacctcaccggcgtccgtccgcaaaaaccacatccacatccaccatctcccgtccatcttccaccttcatcacagccacatccccccgatgtgccacaaccaccctcttccccccgacatcaccggaaagttccatcagctccccataatacttcttcgaaaaaacacagggattccccgtcttcccatcatgctccacacaggcgatccccttcccatctctcaaaaacacatccaccagtccaaaaaccgtctcccaccgcaaccacggctgatctgccaccgtaaacaaacaagcatccatctcccggttgacccgcagcccgatcttcagtgaagaagatatcccctcatccggatgcagattataaagaaaccgcgtgccaagcttctctgcttcctgcgcgatctcctcatactgtgtgacaactgtgatctcacacctgtgcccctgttcctccagtgctgctttcacttttttcagttccaggaggatatgcctgtacatcggcattccgtctatcccgtacagtagcttattgcttccaaaccgccggctgtttcctgctgccagcatgatcagtcccagtttcatatcaccgctccacttcctttcgattctagtacagcgaatattaagtaaccgccatattgacttgcctgatttttcatctgctgcgtcaatatagcagaaacttaattttcgctgtactagctgtttacacttctctgcaggcttccgcaaatcaccatgatcccagactcctgaccttgtgccataagcttctccgccacacaaggatcctccagagtatctgccttgttcagatatgcaagaaatcttcgcccgcccacgcctttttgcaatccgtcttcagaccggatgatcttccacatatccatccatgtcacaggctcatctgtacgctttcccagaaatcccgccacatcatccggacggtgtgccgtatcacagatccttttgccgatgcagtcaagaccgatcactcctactaccacatctgcaaaagaagggatcaccggctcatgaacagccggcactttaaggggtcggcgcctggatccgtcagcttccacaagaagaagatcacaaaagccgggcagcttttccaggatctccttttcggggccggaaatctttggctgcccggccttgtgatgagccgcgatgacgtatccgtattgttctataagccggcatgctcccggaatgtcctctgcctctgcaaaaggacgttccggttcccatgccatatgcgtggttgtggtcacgatcacacgttttccctgtccggaaaatatttctgccagtccaaggatcagactggtctttccgccgcctcctgtgaatgccacagtaagcgctttttcatttttcttcatgacacactccatttatcttctaacttctttcaggggcaccaggctctgtatcggtcacagattctcattcctcacagctttctctgttcccggaagcactccgcaggaaagcagcacctccaatactccccctgcgatacacctcgccttgtctgagatcgtaaaacagtttttcttctgttctgcccttgggtcgatgtccgcgatcttcattccctcaaaaacagggtagccgtcccggatcagcccccggatcacgccggaaatggtagccttcaccggcgtatcacctaccatggcgatcacctggtctttttcaacaagatctgcgatctgacagatgtttttcatgttaccggctgccggtgaatggatcacacgttcctttccgatccctgcgatcagtcccggcactccagtattcggcagggcactgcctttttttatgatccttcccaggttatggccgcgcatggtctcgatcacataatccacatcctcccctgcggtaaagcccgggccaagtcccacagtcagtggtgccatatccctgctggtcccaagattcttttttgcaaggatggcatcgatcactgcctccggctccagttcgcggatatattttccatgggtatctgtcagaagggggatctctccctgtacccagcatttcctgcactgggtccggatatcgttctccgtgatcctcctgcacacaacgccttctacctctgcagtttcgtcataaacagcttcacagaaggccacatgacggcggatggcacttggacggtcacattccaggatcaggacctgatagccactctgatgaagcttgtggatcactcctgtggccagatctccaccacctctcacaaggatcattttatccgtatatgccgctgttttcatcttcatacacctgctgtccgtttcccggcattcctgccgcaagagtatcataaagctccgcataggttgcatccttatacggggatacataaaagagtcccgcgatcccggccgtaattgccgaaaggacagaccagggaataaaggaaagatccaggataaaggtatccatcttctgtccgttcatcatctcacggctttttgcaaatacttcctttgtgctcatatccggatattccgcaagaagataagggatcatcttatattcgtaggattttaccactccgggaataataaaaagcagcgtccacaatacaagatacaggtcccgtaaaaacatggtttttacgatattaccgtaatttccggaacgaaatacactgaggagctttccgggcccgggtacagaataaaggttctcaatgtaaaaatctcttccgcctacctccagaacatttcccacaaagaaatggaaaaggaccccgatcagagccaccgttaccatggcactggcactcagaagcgcaaaaagcactgccagtggggaacgaaatacatgactggcataagaggtaacaccattgatatccgtacccagatgatacgttgtaacaccgtagtccggacttaccgcatttccggcactgcctgtggccgcaccgcttccgccggttgccatcacaatagccagcaccagacttaccagtactgctgaccagtaattttttttgaatgcctgttttccgcgccatttcaagtcactgcgtttccagctgattttctgttcattcataacttaaccctccatatatgcttcacggacacagagctctcttcgtcccttctgccacagcgcaggctccagctctgccagataaccgccgccgttttttacatgccattcataaaaagccctgggtctgtccgcatattcttccataatgttcatgatcgtaccgccatgtatcacaagagccgctgtctttatgttgttacggatacactgtgtgacagccttctgaaatcctgtaaggctccggcacttaaacgcttctcgactttctcctcccggaaaaggaagcgttccattgctgtcgatccacctctgataatcctgatttccggaaagctctttataatttttattctcaaactctccaaaatcacactcggaaagctcttcgatgatatgaaagctttttcctggaaaaaggatccccgcagtttccacacagcggcagagcggacttacataaagagcctccggcatgggataggtcagcttttccagaaattcctttccctccgtactcagcggttcatccgttgttccgatataacgctgaagcttatttccgggtgtctgtccgtgtcgtatcagatataatctaatcatccttcagcaccgtcccaatcccgcataccactcttgtgacccttctgctttttgcagccagtgcagtgcacacccggccaacagcttctcggtactgccgttcaaaagcatccgccggaacgatcccgtagcctacctcctcactgacaaggatcacatccggatcctgctgtgccagcttttctgccaggccggtgagatcttctcctgccttcagagcttttcttatgtattcctgaaatcccagaacacccgctgccttcaaaagctcctcttctgtgatctctcctccgaatttccagtccacatccgggaactgtgcttttgcataggcagcttttccctgatatgcgcctccgattatcatttccatatcttttttacctcatccaaatcttcattacagattaaacgtgccaccaagagcaagcaccagtgccatcacaacctcgcagatgcaaaggaaaaatccggaaagatcacctgtggtccctccaaaatatttcaaagccatatagtgataccaccaaaataccagaagtgcgctgacagctgccagaacacccaggaccggatctacccatatcatcagcgctgcaaggatcacaaacatcgtgataagaacatttcgcactgcgatctctgacgcatttctggaaaattctgccacagtcccgtctgtccttgccttgggaaatgtgatcacaccgatcccggaaagacatctggacatcataaagcccaggctcatgatacagatcccgttataatttccaaggagctgatcccaggctcccagccagaggataaaatatacacaggctgtgataatggcaaatgcacctgcatgggaatccttcaggatctccagcctccttgtgcgttcctgccaggagcttaatgcatccgatgtgtccagaagcccgtctacatgaatgccgccggtaacaaataccgggatcacagtaaggatcacagcgagaaaaaatggttccagagctgcatgcactccgaggatccctcctgcaagccaggtcaggatgccgatggcagtacccacaaaggggaaaaagcacatcatatattttatgttttccttcttccagtccaccatgggcatggggatctttgaaaacatggcaaaggctgccttaaaactgttccataagcttttcatgcttcctttcctcctttatgccatacagggatcccgtatacgacttccacaacctcttctgccatctctgccagcttctggttgatctgtcccagctcttttttgtactgttctgattcttcctcgtagaggatcccgtctgaaaagatctcgttggtgacgatcaccacatgctttgcctgggaaagaagatttttcactccttctgtgatcttttctgccacctccgggtggaagccgccttcccggaacatctcatttgcaaccagattggacatgcactccagaaggaccacgcagtccttcgggatgagcagctcatccagctctgtatatctttcaattgtctcgaagccttttcctgcacgcatgtgccggtgtctgcggatgcgcctgtggctttcttcgtcaaaagcctgcatggtggcgatatagatccttctggcttcgccaaaggaaagtacggtttcttccgcaaaagcagattttccgcttccgctgcctcctgttacaacaaccagcatattatttcagctcctcgtactgttctacattgatatcaccaaaggtactcatggaattatatactgcacaggacagatccatcatcggaaacagtgccacagctccggttccctcgcccaggcacatgccggcgtggatgattgcttccttgccaagctccttcaggagcagctgtgctgcaggctctttggatacatgagacgcaaggatatgatcacttacctgcgggcagatctttactgcgatcagtgcagatacgcaggaaataaatccgtccatgacaaccggcattccaagtgctgctcctccaatgaatactcctgccattcctgcaatatccagtccacctacctttgccaggacgtcaatggcatctgaacgatccggattattcagggcgatcgcctttttgatcgcattgatcttccggacaagcccttcactggtcaatccggcaccacgtccggtcatatcttccacaggttttccgagaagcacagctgctaccgcactgctggtggtggtatttccgatgcccatctcgccggttgcaagaacctgatagcctttttccttcagctcctctgccatggcaattccggcttcgatgccacggatcgcctgatctcttgtcattgccggctctctggtcatatttctggtcccataagcaaccttaagatctgtacggacctttgtatctgtgaccattcccacatctacaggaaaaagctctgctccacactgacggcacatcacacagcaggtagtagtcccttccagaaaattctcagccacaacagccgtcacttcctgtccggtctgggtcacaccctcttctacaactccgttatccgcgcacatggcaaccactgcttttttctccacacgtacctccggtgtacctgtgataccggcgatctgtgtcagcatattctccagctctcccagagaatgcaggggctttgcaatactgtcccatctctttctcgccccctccatagccttttcatccagagggcggactttcttcactgcctcatccaaagtcatcatttgctacctccaatccttttacctgtggtaaaaataataaatttactaaagatataattcaacgccagcacaataaattgtgtgcagaattttgcaaacatatcccggaatcccaggatctccgccagaagccatacgccacctacctcaatgaccatggtcaccagacgggcacttataaatttcagaaagggccgtatatgatccctccatgtttcacagcggtcatgaaatacaaatctggaattcacaacataggcaaacaggatcgccaggatgatcgatatgatgttggcactcatcagcgggattcccattgccctcatgatataaaagcttaacagatttacgagagtcgtacaaccaccccagaaaatataacggatcacatcattttcatagaatttaaggatccactttttcattggtatctcctcctcgtatgatctttgatacgatatatcttggacgacgttttacttcctcatagatcctggcgatataatatccgatgatcccaaggctcatcatcacagcacttccaataaaaagcatcacgatcagaagtgtggtatagccttccaccgcatgcccggaaaaataccggaccagagaatagaccagaaggagcaaggagcacccaaagcaacccacggcaccggctgttacaaactgcagcggaagtgttgtaaatgccacgatattccgaaacgcatagctgatcagcgttcctgcagaccatttggattctccggcctcacgctcctgcacctcaaaaggtacggagatgcttttgaagcctatccaggatgatgccgcccggaaaaacatgctgcgctcaggcatggcgagaacactctccaccgctttcctgtccagcagcttgaagtcggaagcgttttccatatcaaagccggtggcacgggacatgatccgatagaaaaatccggcactttttctgtgaaaaagagtttcttttccccggtttttcttgatgccctccacaacctcgtagccctgcttccagagccggtacatttccaagaggatttccggcggatgctgcaggtcacagtccatcactgccaccgcatctccgcatgcctgtgcaaggccggccacgattgctgcttcttttccgaaatttctggaaaaatgcacacctgtcacatttttatcttccctggatactttttctatggctgcccaggtcccgtcagaggaaccgtcatctaccaggaccagttcataacggatcccggcctgccccaggagctctctgagagtccggcaggttttctccaccatcggttcctcgttacaggcaggcaaaactaccgataatcggctcatttctcctgttttcccctttctttttgttttctctggcgccggtaagatatcacgatcccggcaaacaggatcaggccgatcaccgtcagtatcattccgggcacaatatacggtgtacagtatctgagcgtgatcgtatgcttacctttttttagttccagtcccatatacatactgtttgcctgcacaagttctgttttttctccatctacataggcggtaaagcctgcgctgtatggaatggaaaataccaggatcttatcggaagtggttgtgatatctccgcgaatgcaatttgtctccgttttgatattctgaagactttcttttccaagctcctctgtctgttcttcaacagaagccatgggctgacatgccacatacagatcatcaaaggtatattctcccggcatggagaatgtcagtgtcatagttcctgcagaatagtttttatatcccatattcagaagaaaattatgtcttccgctatagccgttgtatttatctgtaaagatccggatagtcttgtccacagagcccagcgaaacatccactgctgattccttgctttctttccagtagcgccagttattgtcttcataacgcacggtattcttctcatattctgtcatggaatcccattttttatcactgaccactgcacgtggagaataggcattaaaatccagattttttgccacaagataaacctctgcctccggctctccctgatatccgatctgtacggttgctccttctttggccacaatgatctttccgtctttgatcttacagccttttcctgcttccagtgtaaaatctgctttcttatcgtcaaaggtgaggtctgtctcaggaagactgctgtcctcaaggactgccccctgcaggagcgcctgctgcttttcggtcacagaaagcttttcatacttttctctggggatccaggaatcataggtataaccaagaggaagggaatcctcgtcttcgtagatcctgtatttttttgtgacttctgcttcactgtcatagctgtatggcagatacccatatccgctttttttgatggcaaaatatttcaccgaggcaagacgatccaggatactccgtccgtccaggctgctgtaatgataatcccagggggtattcagatacatctcatcaaagaaacggctgatatttccattggccacactgaaataataggaagtactgttggttcccatatacatggcagtgtttacataagagcccgttttgtactggtcatatctggtaaccgctgaatcgtccattgaccggattgctttgtccggtccggactgaagcttctccagtgcctgatccttttcctcaaattctgacagataatctttttcgtaagaatactggtatgaaacattcagaaggatgcttgtcacaagcacggccacgatcattccacagagatattttccctgtgtaaatacgtttccgtaggaaaccactgtaaacacagccaggaccagcatcatcagtgccatgatattgcgttccgtacgggcggattctgaaaacagtgccagcacgccatatatcagcagcatcacaaatatccgtcgtttttccctgatgcccagcgtaaacagttccggatatgcctgtaccaggatatatgcgatcagcattccatacgcccagatccatcggttggacacgtatgaaaatccattcagtacatgacctgcaaaggggatcagcaaaaacagattcagaagcacaaatcccagcttcagtcccgtatattttttctttttggaaaagatcacaaacacgcctgccattgcgactgcggaatatccagcaactccccactggatcatattttcgccgatcagacagccgagatatttttcgtagtaaatgcggtcatataacagcggcacataattctgcgcctgaaagcgctctgttccaaacagagtcatgaccacaggtaaaaagatcagtgcagcgatcataagtgcgaccagataaaagccagcaaatttcaggaaccactgaaatacatcttttactgaacgcttgcggaatattccaaaataccggaaagctgcatacagcaccataaagatactgatcatataaaagaaataaaaattagacattgccgctacagccgtcgcacagataaaaaggtatggcttttcttttttgtaaatcttttcaattcccataaggaccagcggcagatagatcatgggattggaaaaatatggatgcttcatagacgcataaatggtccatcctgcaaaaatataaacaaggcttccaagaaatgtggcctgtttgggattcttgcggtaaaagcagtaaatgctgaatgtgatacccgccagataaatgcggagaaagatcagaatctcatataagatctctgtgtctttttccggtacaaaaacggacagtaaggtcagcggatcaccgatcgcataataatgaagtgttgtaaggatatcggaaccgtatccgatatgcatatcccacataggaagggaaagcttatgctccgtcaccagcgtctgcagaacattccgcagatattttccataataggccaatgcattgatgtgctgcggaacaccgtcatgactccagatcagggattttccattgaaataaaaacaactgtaaataaacagcgagatcgccgcaaaaacaatcgtatacagaatataaaaatctgcttttttctctttccgggatttctccttcgaaaaaattctcttcatatatgtctctcctgtatatgaaaaaaggcctgcggtgcgctaaacaccgcaggcctgtcacctaatgcttaatcagcaagcacactgtataaacagtaactattgatcaataattagtcttctttcttatctgctccgtaaagagtgataagtttctgcagatactcgtatctagcctgagcctcagactcgttcttagcaaacagtcttgcagctttctcaggattctgacgctgcagagaattgtaacgaacctcaccgttcaggaagtccatatagttctccatatccggtgtcttggaatcaaggctgaacttgttctcagcagccgggttgaatctgaagttgtgccagtatccgcacttaactgccagctcttcctctgtctgagctttgctcatacctttcttgataccatggttgatacatggagcgtaagcgatgatcagggatggtcccggatatgcctctgcctctgcgattgcttttacagtctggttgaagtcagcacccatggaaatctgtgctacatatacatagccatagctcattgcgatagatgccatatctttcttcttagtctcttttccgcctgctgcgaactgagcgatcgcacctgtcggtgtagatttggaagactgtccgcctgtgttggagtaaacctctgtatcgaataccataacgttgatgtcacgtccgcttgcaagaacgtggtcaacaccaccgaatccgatatcgtaagcccatccgtcaccaccaaagatccactgggatttcttggagaggaagtctttctgtgcaaggatctcgttagccttgtcacatccgcaagcctcaagagctgcaacgagtttctctgtagctgcaccatttgttgcgcctacagcataagtatccagccattcctgaccagctgtcttaacatcctcgtttgttccgttagctacaaggtcttcgatcttctctttcagaccgccacggatcgcacgctgtgcaagaagcataccataaccgaactctgcgttatcctcgaacagagagtttgaccatgcaggtccctgtcccttagcgtttgttgtgtatggtgtagatggtgaagagttaccccagatagaggaacatcctgtagcatttgcaatgtacattctgtcaccaaagagctgtgtgatcagcttagcgtatggtgtctcaccacaacctgcacaagcgccggagaactcaaggagcggctgtttgaactggctgccttttacagttgtctctttatatttagcgataacgtcttccttctgaggaagtgttacaccgtaatcgaagaatttctgctcttctgtgttagcttcaagcggagccatctcaagagctttgttgcctttctttcctgggcagacatttgcgcaggaaccacatcctgtacagtcaagagcggatacagtcattgtgaatgtatagtctttcattcctgtaagtggaagtgtcttgattccctctggagcgttagctgtctcatctgctgtcatagcaaccggacggattgcagcatgcgggcagacgtatgcacagcggttacactggatacagttgtccggaacccatacaggaacgttaactgcgataccacgtttctcatatgcagctgttccggatggtgttgtaccatctacataatccttgaatgcagatactgggaggctgttaccttcctgagcattgatcttgcactggatgttgtttacgaagtcctgagcttcctgagcaccgtgggatgcgtgagacatgaagagtccctcgtcctcagcgttcttccagctctccggaacctgaacctctacgatctgtttagcaccggcatcgatagctgcccagttcttcttaacaacgtcatcacctttacgtccgtaagtagctttagcagcagctttcataagctcgatagcctgctcctcaggaatgattcctgtaagtttgaaaaatgcggactgaaggattgtgttgatacgtgttggtcccatgccagtctcaataccgatcttaacaccatcgatggtgtagaatttgatattgtggttagcgatgaaagctttaacctgtcctggaagatgtttctcaagtccttccatatcccaagcacagttcagaaggaatgtacctccgtcaacaagctcctgtaccatgttatatttgttaacataggacggattatgacatgcaacgaagtttgctttgtggatcaggtatgtggatttgatcggtttcttaccgaaacgaaggtgagacattgtaacaccgccggacttcttggagtcataatcgaagtaagcctgagcgtacatgtctgtgttatcaccgatgatcttgatggagttcttgttagcacctacagtaccatcagctccaagtccccagaacttgcagtttgttgttccctctggtgttgtaacaagtggtgcgcctgtctcaagagaaaggtttgtaacatcatccacgataccgattgtgaatttctctttctcagtgttctcatatactgctacgatctgtgcaggtgttgtatctttggaaccaagtccataacgtcctgtaaagatcttaacatcgctgaacttgctgtcgcgaagagctgcaacaacatcaagatacagaggctcgccaagagctcctggctcttttgttctgtcaagaacagagatctgcttaactgtatccgggattgcatcgataagagcctgtgcacagaatggtctgtaaagacgaactttaacaacaccgactttcttgccagctgccataaggtaatcgatggtctcctcgatggtatcgtttacggaacccatagctacgatgatgtgctcagcgtcagcagctccgtagtagttgaacagtttgtagtctgttccgatcttctcgttaactttgtccatgtactcctgaacaactgccggaagagcgtcataatatggattacatgcctctcttgcctggaagaagatatccgggttctgagcggaacctctctgacatggatggttcgggttcagagcacggttacggaactctgcgattgcgtccatatctgccatatctttcagatcttcataatcccatgtctcgatcttctggatctcatgagatgtacggaatccgtcgaagaagttgatgaatggaacttttcctttgattgctgcaagatgagcaaccggtgtaaggtccataacctcctgtacagaagactcacaaagcattgcacatccagtctgacgacaggccataacgtcggaatggtcaccgaaaatacaaagtgcgtgggaagcaagtgcacgggcagatacgttgataactcccggaagctgctcaccggcgatcttgtaaaggttcgggatcataagcagaagaccctgggaagctgtataagttgtagtcagggcacctgctgccagagaaccgtgaacggcacctgctgcacctgcctcagactgcatctctgtaacctgtacttcctgtccaaagatgttctttcttccctgagttgcccactcgtctgtagcctcagccattacagatgaaggggtaatcgggtaaatagcagctacatcagaaaaagcgtatgatgcatgagcggctgcatggttaccatccatggttttcatctttcttgccattgttttttcctccttaaaggtttgttaaaaaatatattatttaggcttatgaaggcctaaaattccattgattattatatcatagattcccagttatgtccattttctttcattgttttttgtatattatcctgtacaaacgccgttatctttttcacaaataaaaaagagctgttcggaatttttcctctccaaactgctctccttatcatctcatacgcttatcccaactcacatccgggaatcacttctcctcttttccgaaaagatccttcatggatttccgacggagcattgtccacagctgatcctggatctcctgaagctcatcatgtgcatggcagggaactccgtcctgtccgttccttggacactgatatgtgccgttcaggcactcaatgatggacatatccggatcgatcgcactgtatatctcatataatgacagttcttccggatctctcttcagcgcgtaaccgccatgaactccgcggtatccttccacgagccctgcattctgaagcttcttcagtatcttgtatgcaaagggtgctgtgatcgattccctctcacagatctcgctgacgctcaaacgcggctcccacatcaatgcgcggataacccgcatcgcataatcgctttctctggtgataaacatttttaacctctcttctgttcaactaagctgctgatttatgatagtttccgcattccatccgatctgccacgttcctgggtgtttctgatgtgccagagagccggatatccatatccccggaatacttcattaccacatacgacagtataacccatttttttatataataaaaggttattattttcctgtgattcatagtaatcccctgtttttcctttatttagccgaaaaaaggaaaatacagcttgcaaatttttcagtttacggtacaataggaaacgattgtaatgctttcgtatgtaattgaaacgatatttatttaatgaaaaaagaggtatgatatgatttcagcaaataacatcacactgcgcgttggaaaaaaagcgctgtttgaagacgttaacatcaaatttacagagggtaactgttatggattgatcggcgccaacggcgcaggaaaatctacattcctcaaaatcctttccggtcagcttgagcctaccaagggcgacattgtgatcacccccggtcagaggctttctttcctgcagcaggatcacttcaaatatgatgcttatccggttctggatactgtcatcatgggtaatgaaagactctatcagatcatgaaagagaaagaagccatttacgcaaaggaagatttcacagacgaagatggcatccgtgccagcgagcttgagggtgagtttgcagaaatgaacggatgggaagcagagtccgatgctgctactcttctcaacggtctcggagtcgacaccgagttccactatacacagatggcagaccttaccggtagtatgaaagtcaaggttcttcttgcacaggctcttttcggaaatcctgatatccttcttcttgatgagccgaccaaccacctggatcttcctgctatcgaatggctggaggagttcctgatcaattttgacaatacagttatcgtagtatcccatgaccgttatttcctgaacaaggtctgcacacatactgctgatatcgattatggcaagatccagctttatgctggaaactacgacttctggtttgaatccagccagcttctgatcaagcagatgaaagaggccaacaaaaagaaagaggagaagatcaaagagctccaggagttcatctcccgtttcagcgccaatgcttccaaatccaagcaggcgacttccagaaagcgtgccttggaaaagatccagctggatgacatgcgtccttccagccgtaaatatccatacatcgacttccgcccgaaccgtgagatcggaaacgaggtcctcatggtggaaaatctgtccaagaccattgatggagtaaaggttctggacaacatttccttcactcttggtcgtgaagataaggttgcctttgtgggcgccaacgagcaggccatcacaaccttcttcaagatccttacaggtgaaatggagccggatgaaggaaattacaaatggggcgttaccacttcccaggcatatttcccgaaggataacacacaggaattcgataacgaccttactatcaccgactggctgacacagtactccgagatcaaggacgcaacctacgtccgtggattccttggccgtatgcttttccctggtgaggatggtgtaaaacgtgtccgtgttctttccggtggtgaaaaggttcgctgtcttctttccaagatgatgatctcaggtgccaatatcctgatcctggatgagccaaccaaccatctggatatggagtctatcacagcactgaacaacggactgatcaaattcccgggagtgatccttttcacctcacacgatcaccagtttgtacagacaactgcaaaccgcatcatggagatccttcctaacggcaagctggtagacaagatcaccacttacgacgagtatcttgccagcgacgaaatggccaagaagcgtcacgtattccaggttaacgaagaggacgcacaggataactaaatcccatgcttctgtaacaaaaaatctcccctgcttccgcctttacaggcagtcaggggagtttttttatctgttttatatgcgcttactccatggtgatcggagcaagcttgccctgtgttacatccagaagatctttaagcggtaccttcagggtaaggcctactcttccaccacttacatagatctcatcaaagttttcggcagactggtcaaacaccaccggataattttttttcattccaagagggctgcagcctccgcggatatagcccgtgatctttgtaagatcctttacatgaatcatatctactgttttttcgcctacagactttgcggctgccttacggtccacctctttctcgatcggaactacaaacacatagtagccgccgcttttcccttccatgaccagggtcttaaaggactgatcatgaggggctcctgtgatgtctgcacagtggatcccatctatgaactctccacagtcatatgcgattgcttcatattttactttttttcgatccagcattctcatcgcgtttgttttggcttcttttcccatttctgtcactcctcggatttttctcagttgtctttccactcatcaagctcatccagatcctcatcattcatcagatccgggtcattcctgtaatttccatattcttcctgctcatcaaaatccgccatattttcaatatccatccggcgtcttttctgctgcagtttttcaaaatcttcatagctgtctctgttttccgactcatcaaaacgatcatagtcttcatgatcctccggatctgcatagcgggatctgcttcccgttcctgcattccttcgttccctggtgctgctgctctggctgtatctgcggcctcttctgtcatccgaagcataatttctgtcggatgttctgtttctgccggatgttccggaagtgcttcttctttcagtggaactgcctttgctgtttctttcgcttccggatctttttcggctgtctgcataatttctttctcgtctgtcagagttgcgtccttctctgtcagatggtctgcgggaacgtctttcaccccggctttcccggtcatcgtttgcccggttttcgtatgtatatctgtgatcgtccctgttacggtcagaggtgtattcacgactgtttcctctacggtcccttcctgccggcttcctggtctcctccggcagagttccatcgtcgtcatcctcttcttcgtcatcttcctcatcgtatcggtctttgttgatggcgaactggatcagcataccaaggatcgcaattcccgctgccataccgacgccatatggaaactgcgccagccctgcgatctttgcaatggataatcctgccagaacaccacccagtatactggttccgacaatgatcactcctttcgcataacgcatagcaagtattcccagtcccacgccgataaggatgcacaggaaaaaggaaaaagaactggtcggatgaatcagatagatactcaatgttattccgataccaaatcccagtacaaagattcctgccctgtagatcagaaacgaaacaacagccagtacgatccccagtcccgccatggcacctgcgatcaccattttatcctgaacaccggacatataggttacaccaaagccggcgcctgctccgatgataaatccaaagatcatcatccagaaccggaggatacgatatcccaggatacagttcaaaagcccgaaaacgcagagcactccatatacgatcaccatcagctggctgatctgttccatacctcctgctctctgcagtatgtcaaatcctcttgacaacatatccatattcataacttactcctctctttccaaaaccttcggaaatcttcccgaagatgtttcagaaaataaaatatatggtataaaaattatccatcactccataatgatactccacctgaccaagtccgtgaagcttcatataatactgtgccacattctgtaccacgccatcatccagcaattcctgacaggcttcggaaaaagcttcctgactgccaaacttgaaacgcactacagccgcaccattatccattctcatcttacaataatcatatatgtcctgccagctgtaatcttcaaagtacccctggttcagcacataaaaatccagatccttcgcagtacatgccggaactgtcagttcttccgatggtgtataggttttttcatattcttccgggaaagggcagagataatcgtaaatgatcgtcttatgttcttccagctgtgcggcatctccatttaaaaaatccggctgatccccattggtagcatctacataataatactcctggcctatttttacaatatcccatgcatgaccctctgtacttccttttgtgcttccgtccacataaatacagggaatatccagcctttccagaagatactggacagctcctgcatatccggcacagactgcggattttttccagaaaacacctgctatgctctgatcatcctccccggtctgatactgggtatggtcaataacatacgtataaacaatgcgtaccttctcgtagtcaccggcatcctccgggatcagggctctgacctcctgaaagctctgctccatggccgtctgtatctcatcgatctcgctgtctgtataagtatagcccggagtaaaaacgcagtaatcactgtctgaatacgtagttttgtagattttttcacgattgtggacccagaatatctccgggtggtctttcaatactgcatgatagcttctgtcaatactgttatcatcggagatcgtcagataaaactccttttcccgggcacggattcctttcagcagctcccgatatactctctgctcttcttccgtaagctgtttgaaataatattcctgatgcccttcttcgctctgggcaacctccatctgacgcagttcctctacttcctttggttcgcctgaaataatgctctttgctatggagcggatctgacccagtgcccctgccgaagcgctaaagggctgaaggatcactgcagctgtaagcactgcggctgccatggggcagaaatttctttttttcataatatcatgtcctatgtctgaagcagcgattgtaagaaagggcagcctcccgtgggagactgcccttatcttcaatcgctgtcccttagttttccatttccagtgtttctacatcatcatcaaatgtatccactgcatcgtccatggtctcctgatccagagtcagcgtctcaacttcatcttcttcctcatcctcctgcaaagccttattcttaaaatctgcaagaaggtcactggaaacagtatcaccggatgccagtgcatccttcagtgcatcagatctaaccacatccgtgaggagcttttctgcactctcctctgtcagaacatcattctctgtagctgtggtcttattttcctccgctgttgtatcctgatagaaggatggctttctgatataacggaagcttgcactgtatgcctcaccaaccgttacaccattcttgcttgaggaacaatgtactgcgatccagtcgccggaatccgtctttccgcacaggataccaacgtggttgttgcttcctgcttccggtcctctctggaataccagatctcctggctgtgcatctgcttcgctgacaacaccggccttctcccactggtcagaggttccgtctccaactgctgcctgcattccctgatccttatatccattgatcactgcccaggtaacaaagccgctgcagtccagaccatatgcacggagcgtaccggagcttctgctaccgtctgctgataccttctcaacggagccccagcttggatcttctccaatcaccgtagatttgccgccccagaaatatccgaccttgccaaccagtgaatacgctgcggtgataacatctacacgatcctcagaaacattgtctcccacgctttcacggacaaagcctttggatgcggtaactaccgcacagagaagcttacagtctgtttccacatatttcttaagaacgcttctgtcttcctttgcaatattgttcttcttgatgtagtagttgatcttgcgatttccgtaggatatcttggtaatatcctgcttgtccctgacgatggggttcatctccgcaaagatccttgccagatcatccttgcaggatgcatccaatgtaaatgacgttgctcctgctttgctcttttcgtaaatataaacagcaaggatatcctgccagtttcttaccagaagtgtattctccgtatcggtaagcttgttcttctctttatattctctttcgatctcttccattacagaagcaaaatcatcagagaaggccagatgataattgctcttaagactatccagataaaaatccttgcccgcatggagattggataccatatttgtcacataaacaggatctccgatctgtgttgctgtggcgttatttccatctgtgatctctgtattcttgttatcttccgtgctgctatcatcttttttgttgtcttttttgttatcactgtcgttcttgtcgacagctgcaagcttggcttctgcctcagtcaggatcttataattcgtaaccttggccttttctgtattagacagtgcctcataagctgcacgtacgctatctatctccgctttatctgctactgtgatcgttctgcctgccagtgctttgatcttccggatcaccgcctgtacctttgcagagtcatccctggccggtgtttccgtcggtgcaggtgttgcggttggctccggcgttgccgttggtgcaggtgtcgctgtcggttccggtgttgccgttggtgccgttggtgcaggtgtcgctgtcggctccggtgttcccgtcggcgcaggtgttgcagttggctccggtgtttccgtcggcgcaggtgccggtgtatctgttggctccggcgctgtagttggttccggttcaggtgcagcagttatttccggttctgccggaacttccggaacttctggctccggttcacttacctcgctcccgtctcctgaaacaccttcctcagcaacaacattatctgcttcctcggcggcttttactccggttggaactgccagtaccatagctgataacatcgtgatgcaaaaaaacttattcaggtacttgttcttcatatttattaagatgctcccttctttccttgaacatccctttacttcccctataataaaggtctgccttaaaccgtttgataacttaaagtttaattcaatttattttagcatacgaaaatcgtgaaatcaactgttctggtaggatatccccttcaattcatctatttttcactttttattcacatttttgtaagattttttagagtttaccataacgtaaaaaagccacagtgctctcacacactgcggctttttatatactgtcagacaatcactgccggctgtccgcccatatgaaactgttttctgacacagagctgaaaaatcccctgtacaacctgatagcacacccgaaggataaaacggatgtcatcggcaatgcaccgcgggctttccagataatatgcatgacgctcacggatatattccacaagttcctcaaagctttcaaactgcttcgcttcttccagctggctgtctgctgcgccgctgaggatgcattctctcaggcggtttttcagctcagcttcataagaattatgtgctgcaagatttcctttgtatgttttgttatgaggaaaagtaaaataatcagccatataatgcatgacctcaccgaatcttctccagtatactctggcattctcttcctccgggttcttctcgacaagcgccctcatcttattctggaggtgatcgaatgttccgaaaaactcatgtctggtggtgagaaacgatggtttcagatcaggcatgatattgcccaggcaaaacgcttttctgtgctgttggagactgtacacctcagacatctggtcagccaggtatctgcctaacagtatatgtgattttttacgcaattttttccctcttccttctttcctgatccagatcctgaccggtcaacagtaatttggttccgcccggtcctcttctgggatccataaatcatccgtttaccggaaccaactttactatagcactgttttttcaaataatcaaataaagattatgtaaattttaatccagatcaaaaagctgccgctgcttcagatcaatagatgcccagacggtacttgtcttcggttctccgtaaagataaaccgtgctggaaaccaagcagcatatataattcactttttgttccaatccctccatcaagtccaacactgttgtgcgcagcttcaaccaaggtctttgccctatcttcagtaactcctctgccacgcatctttttatcatgccagatctttcggatcccatttactccaagcgcgatcacatcttttggcaatggtgctttttcaagcactgccaggccgcttattgcatcaaatcgtgtgtataatcccagatattccgggaaatgtattgcaagccatttctgaatcctgtttgcagatatgttgtgctgcttcatgatcccgtcacggctgtataccaggtctcttatcagaactgcaatctttttattctcagtcttaagtgtctctgcccaaaggctgaaagaattgaacccttccagatcgttatgaaaagaaaaaatacgttttgtaagttcgcgtcctctgttatcaaaagctcttgcataatgtatctggcttcctatatcaactccgacaaccattgttgaatctgttacttgctcaatcttttcattctgtgtataattcatttggaacctccagtgcttgattgttttgtttacatccgccaagatgcaactcaatcataccttgaggttcttttttattcaattggcgcttttaatgaattccatatacctctttattatatttttcaatctcgtcatcaataattgaatctacatgagggaacagacaaccggggcctccataggtaatacatggaatgaaatgtccgtgtggtgcatactcctcacatgctcttctgacctccttgcggatctcttcttctgtggaatccactcggtctacgatcgaagcatcgattccgcccataagtgtcattcttccgttcagctgtttctggagcttcggaatatcattctgcggaagtgttccctgccagatgtcaatcccaagatcaaccatatcctctatgattggttccatgaaggaatctgcgtgatgcatgatgatcactccatggtctttcatatatttataggatctttcatactgtggtttgataaattctctccatgtgtccggactgatgaacagggactgcttggaaccccagtcatcgtgggaaaggatgatatccgggtggagattatcaacaatcagctttgtaagctggaaacggtactccccaatggcattgcagagatccatcatatcctccggctcaagaaggaagttcaccagcatatcctcaaatcccatcagaaagtgaagcctctcaaaaacacctgtaggcataaatgccatgaaaaggcttcctgaatcctttatctcctgtgccttctgtttaaatggttcccataaagccggatccgagcactgaccgacaatatccgggatcaccagctgctctttccattctgtgatatcatcaatgaccttgttgtcctctgttacatgtggcattgcagccagctgttcctggggccagaggatctcagttccgaaaagatccttcataggctccataccacggtgacggtttccacgcacataattatttgccgggttcggcgggtaaaaggtcgcaccctcatactgtctcagaagtcgttccggcctgccatccttttttatcgtttcaagtaaaatctccgatgctttcaacataatgcttcctcctttattatcctgtgatctttcgaaatacccgatcacttatctttatgatcttgcgtcaatctcagcctgatactgaagaaccttttcctttgtgatcttaaatccaaacaccagaagcagaagacctgccagacagaaaatagccggaacaagtgcaaaggaaatcgtcattccctgacgagccgtcccctcaagaacaactccagatttccagcctaccgccacaagacaggcgctgagaatcgttcctcttaagaacacggcaattttcagcggaagattctgtaatcccatgatccatccggatgcatcttttccgctcttccatgttgcatacactacagtgtcagcataaagtgcaggtgaagctgcaaaagccatgccatagaagaactgggcaagtgtcataagagcgatcactgtcattgcatttccatagaaaatatatacaaggaacagtgatactgccattcctgcataagcaatgatcatagttgtacgggacgatattgcttttgcaatgtatctcatggaaaaagctccgatgatggcaccgatagcaacacagagaagataagtggtcatcagtcccggatttcccattgcatccctgaaatagtaaatagcagatgctgctgtcacaaatttcacacaccattttgcaaggtctgccagcatcaggaccataagaggcggattctgaaacagggaagcaaacatctctctgatcgtgatctttgttttgtcatttttctttcctgctgtttccgtttcaatctcttcatagccttccgtcatcttgaaatgggcgaaataggttacgaccatcagaatacccaggcagaaagctgctgctgcaaatttatttttctcaccgacatatccggcaagaagtgttgcaaatggaagacccatataggaaaacaacagaccgcctatgttattccaggttgccctggaggatgcaagcgttgctttgtcttccggtgttttaccaacaatactgatcagggttgcattggcaacatagctgaaattccatgccacatgagatgcgatggatgcggcaatgatcaccactgccgaaagccattcattatcactgacacgtatgaacatgaatgcgtacagaaacggcaccatccacggaaccatgatcagccaggaacgataacgcccccatttctttgcttttgtgccattgatgattcctccgtaaagccaggacagacaggcatcaacaatagtaaatacggaattgatcacaccagctacaccagctgcaaaaccagccagatccgtcagaaatgtcataaagtaaaatgtctcgatattactcataagaacaaatccggcatcaccaacaccaaagaaatatttcagggcatttgtaagaccctttttctgtttcggatcttgtttcggtatttcatttttactcattttctttcccccttcgctgttttttgtgggaccggccatttccacaacttcacgttacctttgatgattacagtatagttgtttttttcttgttcgtaaatccgcacacttcttcattctttcttcaatgcttcatactttttgtacagttattattgtaaatatgcacaaataattttccatccgttttctttttattttccgtctaatatgttataatttcctataaatacaaggcttttatgaattggaggaaatattttgaacaaaagagagcatttcgtgaatagcctgcatacaggcttccatcttaatctccagatcattgctgacgattttgcggagaaaaaagaggatgtttccatcctctgccgtgaagaccccctgacgctggatggtcttcgcatatatcaggcaggagccctgctaaagccatgctacctttatcttgtcttcggcaattctctttccgaaagcttcctgcgataccagaacatcgcatttgtagtggtgggctccggtaatctttcctgcttttccgaaagctgcaggatccttcacattaagggaaccctttctttttctgaggtcttcaaccaaatacagcagacctttgacagatattctgactgggacagtaaactccagcttgcacttggaagtatcgatccgctgaatgagatgctggaagccagtctggatatatttcataatccggtttttgcccacgacaccaacttttatatcctttcttctccccggcacgtaaccggtatgtccgaatgggtccatgaccagcgtacaggtagactcatcgcacctttaagcctgattcaggatttcaagcttgatgccgaataccagcgcacacttatcacccacggcgccaatatttattccgaagagctccgcggttaccgtatcctctacatgaatctctgggtcagcggcaattatcagggcaggctttgtgtagatgagctccagacggagatacagcccggacatttttctgctcttgagtatcttggctcctttatcgagctatgcatccgtcggcacaatctgttccaaatctcaatgggaaatgactcccggcagttcttcacggagtatctttccggaaagctcacagaactacaggcagttaccgatcagatccagtatctgaactggaatcgccatgaccggtatcttgtacttcgtctggaaacccagcagcaggatgaccgtatgcactcttccatcgccacactgggacacattgaagcccagatcccggaaggtctggcttttacctatcagcagggaatcgttgtgatcgttaatctgtcctttaagcactctgtatcttccgatgttatcagttcacttgcgatcatcctgcgcgaagggctttttaaaatgggagtaagctctgaatttcgtgattttctcctgatccctcaaggctatattcaggctgtttccgccttgcgcctgggcaaaaaaagtcagagcatggcctggtgctatcattttgatgcttatcttctggaatatatgctttcccagatcagccatcagatcagtcccgagcttctggtctcttcacggctggatgcactgcagaattatgaccgaaaaaacaatactgagctgtatcacacactcaaggtctatctggagcatgaacgcaattctcttcagacagcccgtgagctttttatacatagaagttccctgacctaccgtctggagcgcatccagaagctcacaaaggttgatctggataatccgaaagaccggcttcttctgcagctctgctttcttctgcaggaaaaggaccagactgtcacctgacaacctggtccttttttctgtttatatctgtaaaaactccaatccgaaataatgttccatccatagcctgatggtttcttccgaatcacttattttcgtttcaatggatccatcttccttctggatcgtaagaacatccccagtcagcgcaacacttccttctggtctgcagatgctcaccactctttttctggtaattaatacatctggagattttgcacaatagaaattcagcagttcaaaatctgcttctactgtaggagtctgtgaaaatctgagtattggcagatatttttcttctttccttcgttcaacaagtatctctccgtttgtatttcccggcttcatgttaacacggtaccatccgtttttttctctgtggataccatccttcataagaaccggcttcttgggtccgggacctccgtatcctacatcacagtaatagcttccttcctcaaaaataacaagggttgcccggtgcaggaccggcggaagctcttcccggttccacaatatccttaccgccacagggatcacacggaaatccaaagctttcagaagctcataaaacaatttattcagctcaaagcaatatccgcctcgttttctgacaatgatcttctcataaatatcttccgacctcagagaaggaatccttccctcgtcaaaaacttccagattttcaaagggaatactgcaaagatgaaggtccattatcttttccagacattttttatctgttcttaattcaccctcatatccgatcctgttcagatatgcctcccgttctctgtcattcattttttcactcctgttctattcaagaagataacagctggtataggcgatcgtacagggaccataatagtattccagaccatttgcctggcatacctgtgttaccagcattccataggcttccatcgaagaaaatgcctgttcggggaaacggcatggagcatccggatatgtacacgttttacattttgtacagcacccggcccctatggggagcatacccggccatctttctctgagcactttttcaaattcataaaaattctgtttatgaaccgcttcggtctccatcatcgtctctccgtccagaggatcctccagtttccccactgtctggacaataatgccttccctgtacttttctatcttttttctgcatacttcaagatctccgcatccgggaggacagctccagcgttttgcatacatatggcaggtattatttttgcacatttcccttacctccggcataagctggatcgaatcgctcttcagaagcgctacatgagaaaatcctgccttttttcccatttcttccagttcttttatattaagcatatccattctcctcgcattacggaaagcataagccatccacaaaacagtcctggaactccggcgaagctgccagctccacaaaatccatatttttgacagttcgatccatttcttttctttcctcttcattcaggagtgcgatcctggcaccttctccggctgcatttcccaccggctgtatcctgggcagcagctcagccgggaacatcccgatcgctgccgcactttccggattcatgtaattgccgaatgcaccggcaagatagacccgtttaatatccttttctgtgatctccagtcttttcataagaagaaaaattcctgctgcgatagccgcttttgccagctgcacctctccgatatccttctgtgtcagataaacgcccctgtcatttcccgacttttccggaggtaccagcacaaacactcctgccttttcctggccactttccagatgaccactttcatcaataaagccagccaggtacagctgtgccacaagatcgatcagacctgaaccgcataagcctgccggagccttatttcctatagtcgtgtattcccattttccatttttgtatactacatgatctactgctcctgctcctccacgcatcccgcactcgatctttgcaccttcaaatgccggaccggcagctgttgaacaacaggctaatctcgttttatttccaaggaccatctccccgttcgttccaatatcgatcataaggctgatctcgttctgctgatcctgtctgagcgtcaaaatgcagccacaggtatctgcccctacatacccggctatatcaggcagcataagcagctgcccctttctgtggatatggagcccatattgctctgcattcagtgtaagctcctgactgatcgccggattatatggtgcatggaccagcgatgccggagaaatcccaagaaaaagatgatgcatgcaggtatttcctaccacagatacctgacagatatctaatgtgcttcttcctgcttcctctgccagttcctggagcatttcatcaaccgcattccgtatgcagccggtcagctgctctacgccatgctccagagcatgatccgcccgcatgatcacatctgcgccatactgagtctgtgggttcattctactcttgagagccagctgtttcccggtcaatgcatccataagatagccaaccaccgtcgtggtacctatatcaaaagccgcaaaacagatttttttctcttctctgctgatatccaggatctcatttcctgcacagatcacataccattcttctgcttcttttctgcagccgtaaagcttcgatgcaattacagtatcaggcagaacaggtttttccacatccagctgttctgtcagccgctcccattcagagcggttgtctcctgtctccggtttcttaagaatcacttttttctgtttcagatcaggcctgaacgcaaccggtctctgcattccttctgtaaggatctcctcttcctggcatccggacaatgtatctacttcaaggtcactatggatttccgtctgacatgcaagcaccatgtgatcttctattttaacacgacatttcccgcactttccccggcctccgcagggtgcatcaggaaccagctttgcttttctttccgcctcaaggatcctggtacccggttccaccaggatctccttttcctccctgataaattttattcggtacattttcatccctccgatggtcactgtaaagcaaaagccgctctgccgtctatgccatgcacagacaatacagagcggcccgttttattttcccttatgctgccaaagcttttgcaagaactgctgcgcttgctgcatcttctgaatatccatctgcgccgatctcatctgcaaactccttcgtgatcggtgctcctccaaccatgatcttaacattgcttctgaaatcttccgcattaagtgctgcaactgtatctttcagagccggcattgtagttgtgagcagcgctgaaagtgcaattaccttaacatccggattttctttgtaacattcaataaccttcgatgcaggtacatcaacaccgagatcaataacttcaaagccggcactttcgatcatcattgcaacaagattctttccgatatcatgaagatctcctgctacagtagcgatgataagttttcccatacttcctgtagcgccggatgcaagatgcggtttcagaacctcaacaccctttttcattgcacgggctgctaccagcatttccggaacaaagatttctccgttcttaaatctttcacctacaacagccattgcatcgatcatgctgttaagaatctctgttgcctcacagccttcatcaagagctgactgtacagctgcacctacaagttttgcttttcctttttctaccaattctgctacttctgtgatttttgacataatcaaacacctccgctttttattttttatccgcattccgcatatgcgttttatttatttttttacaggtccgatcagaccttctctgtatgctccgatgtattccatacagtaatcatccagaccaagcaatgcctctgttgcatatacaagtccaagcatatctctgtttgtaggatccatgatcgcactgtcaaggccggcattcattgcaagtaccacaaatccgaaattgataagcttacgtaccggcagattgaaggaaatgttgctgatcgccgctgtaatgtggatcatcggatactgtttacggacacttgaaattacttccacgttcatcgcaataccatcttcagatgtacagagcatctcaaccaatggatcaatatggatacgatccggtgaaattccgtactctttcgcttttgccatgatcttgtcaaataccttcagcctgtcttccgcacttttggggatacctgtatcatcgcttagaagtgcgataacctgccaccctttattttcaggctgtgccataagaggaaaaatcttatcgatcttatccccttcaccggatacagagttaaaaatacccggttttctgcagaacttgtaagcttctgtaagaacatctgcgctgggactgtctacggaaatcggaagatctgtcacttcctgaatacagtcgatcatccatttcaaggtttctacttcttctgcttccggaacagatgcgcaacaatcgatatagcttgctcctgagtttgcctgagcaagtgcccgctgcttgatgaattcttcatctctgtttgcgatcgcctccgccacagaggggatggatccattgattttttcacctatgattatcatattatttatcctcccgttaacatattctggcctgcatcaagaattgttactgttcattccattctcagtaacacgcttcgcagaatattaccaatgaacagtaaccaagaattcttatttcagttccatgtcttttatataatgattgtatcaaaataaatgcaaaaaaccagccgcatttcataccataaacattgcatttattcctacattttgtaggaatgttttttaggaaagaccttcgtaagcagcaatctaaaataagcccataaatcatagctttgtctacgatttatgagcttatgctaacacttatttcatattccttaaatttccctgaaatccggtgtcccgtacaggtcatacggagtactctggtatacgtaataattcaaccagttcgtatacaggttgttggcatgggccctccaggtgaggagtggtttgttgtttggatcgtcatctttgtaatagttcttcgggatttcaataggcagacccttggcaaggtctcttttatattcgccatccaaagtcacgcggtcgtattccggatgtcccataacaaagattttacgtcctccctctgccattgcaaggaacagaccagcctcttcgctttccgccaggaccgtaaggtctttgcatgcatggatatctgcaataggaacttctgtgtgtctggaatgcggcgcaagaaatacatcatcaaagccccggaccagcgggatcttacggttcagtaccctgtgctggaaaagtccgaacattttcttatccagaggttttttctccaggccataaaaatgataaagactggcctgcgctgcccaacagagaaagatcgtggaagtcacatgcttctcagtccaatccataatctcagtcagctcattccagtaatccacttcctcaaaaggcatctgctccaccggtgctcctgtgatgatcattccatcaaatttacgtttctttatatcggtaaatgtttcataaaacttgttcagatggctgagagatgtattcttggcttcatggctctccacagccataaatgtcacatccacctgcagcggtgtattggaaagagaacgcagaagctgcagctctgtttcttctttcagcggcatcagattcaggatcagaatatggatcggacggatatcctggtgcatggcacgtttttcgtccattacaaatatattttctctctccaggatctcctttaccggaagatccccctgtgttttgatcggcattgtttgccctccttatatatgaagcgtctcttataaaggagccgctcggcttttttcttcagataaaaagtatctccagtctgtacggcctttactgcactccggcaagtttccgaaaatcttcttctgaaaggatcggaatccccagttctcttgcctttttgtttttggatgaattggactggatgtcgttattgatcagataattggtctttttggtaactgaaccggtaaccttgcctcccagggattcgatcagctctttggcctcacttcgatttccaaagtgcaccagacttcctgtgatcacaaaattcattccttcaaagatctgttcctgtttgggactgtcctcctgaatatgaagaaagttcatcagatgatccaggcggcgattattatcctcatccctaaaataagctaccagatttccggcaatgaccggcccgatggtatcaatatcactgacctcttccagactggcatgacgtatcctgtccagatcattgtcaaaatggcggcagatcacttttgcattagccagaccgatatttgcgatcccaagactgtagatcacccttggaagtgtagtctctttcgcccgttccagactttccataagattatcataggatttctgcccaaagccttccatttccacaatctcatctttataccggctaatctcaaaaatatcgccaaagtcatggataaatcccctggcaataaatttctccagtgttgcttcggaaagtccgtcgatattcatggcatccctgcttgtaaaaaggccaaaggatttgattttcttggccgggcatcccggattgacgcagaaaagacattccacatcgttttctctcttcactaccgtttcctgtccgcaggccgggcaggtatgcgggatcggtgcattaccgcttccggtcagattttccgcaatctgaggaatgatcatatttgctttgtatacacgaatggtatctccgatccccagcttcagttccttcatgatactgatgttatgcacactggccctgctcactgtggttccttccagttccaccggctcaaaaattgctaccggattgatcagtccggtcctggacgggctccactcaatctccagaagtctcgtatcacgcatctcatcggcccatttaaatgccatggcgttccttggaaacttggccgtagttcccagagattctccgtaagcaatatcatcatacaatgccacaagtccatctgacggaaaatcattggtcgtaactgcttccgcaaagtaatccatcgcttcatccagagtttccgctgtgacttttcgatattccacaacctcaaaaccctgttcattcagccaccgaaactgcacctccctggaattccggaaatccacgccttccgcactcactaaagaaaaagcataaaaccgtacgtttctctttgctgtaatttcgttattcagctggcggacagaaccactgcagagatttctgggatttttgtatttggcatctgcatctccgatggtttcgttgatcttttcaaaatccgaataggtaatgatggcttctccgcgaagtaccagtctccctttaaaagaaattttcagaggtatgttcttaaatactctggcattattggtaataacctctcccacaataccatttcctctggtaactgcctttataagctctccgttttcataggtaagcacgatcgttaagccatccagcttccaggataaaagtgtaggatgttccccgataaactctctcaaagcttctctctctttggtcttatccagagacagcatcggtctctcatgttcttccttggggagctgctccactgcctcatatcctacattaacggttggactgtctgccagaacgatccctgtttctttctccagtgcgctcagagtgtcgtacagggcatcgtactccacgttggacatgatctccctgtcttcctgataataggccctggacgcttcccggagcttttctcccagctctttcattttttttatggatgattcgttcatggcttcctcccgtccttttttctgatttttcggaggaaagcatctcctccagttcttttcgttcttccggccggatctcacgatatttcccctcttccaggccatcaatatacagattcatgatccgaacacgtttcagtgttacgactttatatccgaaatattcacacatacgacggatctggcggttcagaccctgggtaaggatgatacgaaaactgtttttccctgtttttgtaaccttgcagggacgtgtgaccgtatcaaggatcggcactccgccgcccataccacggataaattcttctgtcaccggtttattcacagtcacctgatattccttttcatggtagttccccgccttcatgatacggttcaccagatctccttcattggtaaggagaagcagtccttcggaatctttatccagccgtcctatgggatagatccgcaccggataatccagatattctgttactgtcatctcattccgctgttgtctggtgctacagacaatcccttttggtttatgaaaaagaagcaggatctttttttcctgtttttttacaggctttccgtcaatacagatctccgcatccggaaggatcttcattcctgtagaaaccaattctccattagcagtaactctccccgcttctatcagtcggtctgcctctcttcttgagcagactcctatatcgcttaaatatttattgattctgattttttcgtccattgttctattatatattttttcccacgtgttcgcaaccggttatttttcttgtattttctttctcattattgtatgataaacagaaatatacttaaatatcaggaggaaaaacatgtcagagcatactccacgtatgaaccggctgctgatctttgtcgctgttttcctgtgtctgatctgcggtattctctttacccagtcatcggccggtccttttgaaagcagcagtacttccgtagtttccataaataccaacgatatttcggctattgaaccaagttcagatcgcgatcaccatacagatgcatcgatatcttccggcgctccctcaccttccgccacaccgtctcctgttcccacagagattcccgaaacagaaaaggtttcgccggaggcagaaaacggagtctggacaccggatggcaccaactggaaatttatggttgacggaaccgcctataccggatggcttaccgacacagatggtcatcgatattatttcaataaggacggaatcatgcagaccggctggatcaccctaggcaaaaaacgttattatctggacgaagacggaatcatgcagaccggaaccatcaccgtaaatggaaaaaaatacacattggcagcagacggttcactcaaaaaatgatctttcgttatatcagagcaacaaaaatgcaggttcttccggaacctgcattttattaacccttattattctaacagaccactatagacataaccggtctgtccatcataatcaacctgtatccagtcgccttcctgccctttcttttcaacttccgttcctgcagaaaaaccaccgataacctcaccctctgaatctgcggaagcacgaacattacaatcctctgtaactgtaagcattgttcctgcatctgcggaagcactggcatcttcaccaaggccctgaaggaattctgccagagagggatcactctcctgcgcagcttcatagtccgtctttacctttgtgataagctcctgcacatccttctcagattccagttttttcacataggcactgatatctgcatcatcatcagcaccacctttgatcttcagattgccgtcactgcccgtctccacataaaactggctcagtgccggaaccggagtctcaattccagtacagatataattaaagactacataaacgacatacgaatcgtccgtcagtcccttcttagcgtaaacattctgtacctcatacccatcaatataatcccttgaattaatctgcgactcgtcagccggcgtaaatccgtcctcaatcgtcttaagtgttgcaatgtctttttccccaaaagctttataatagctctgaatcagctcggttacttccgtgctggatttttccatggttgtctccgcatccgtatctgccgcgggactggcgtctttcttctcgtctgtctccccatcatttgccggagaagaaggatcattttcctggttactttgggctgttgtctgatcttcattggaattccccttcttacctccaacacaggcgcggacgccaaagatcagaacaagcacgatcaccagaatggctccgcctaacataaaatagcgaaggttatctgataaccattctctgaaatcatccaagttcttgtcctccttatcataacaacacgccggaacaattcccactgttccgggtaacacacctgaagggaatcgaacccccgcacatggtaccggaaaccactgctctatccactgagctacaggtgcataatgaaaaacataacttctaaattcaggtatgaaattatcaaagtaggtttacactgtttatgattttaacacaaatccatgaaattgtaaagatttttttaaacagtacatattcatcacacattttatggttgctgttcactccgttctccgtatcattttacgcactttagtcatttttccaggccagaagggcgaacacattcacccttcaaacctgtataccacatatttttctgtctgtgcaataggggtacatcctgcttgacggatatagtcatgatttgtaagatctaccggaagaacaagataatcggtttccgttcttttcaatacctgccggaacttatcgatccctacatccatctgataactgatcacatccatgatcactttctggatctggtaggccttgctgttttcgtagtttcctaccacagtacttcctgcacgatacaggataaaattacgatccaaaacaaggatcagtgacggatcatactgtctagccaccagattcagctcattgtcaaaaacaaccttgggttgttctttatcgcagtcctgatggatcacatcgcatactgagcgcagctcattcgggactttatagatgttttccgccatcacataatcttttgcaatgccgggaacaggtgtccccgtagtgacgatcactgccgcaaggatcagcgctgttacagccttcagccatcgaaaccttaccgcttctacgatccgtacagcataataggcagcacccgggatcaccggaaggatccagataaagcgataatattcactttcaaaatgtacctttggtatcacatattttacaagaaccggattatataccgtaagtgccagaaagactagataatacaggaacactctggattcttttctcctgcggtaaaaaatatcccagagtatacctgccagaaaaaatacaggcagcatacagccactccagtaattttccatacagatctgcacaaaacgcagtcccagttcttcgatcgttactcccgccattttcttctcctatccatagtatcttcccagtttcctatgatgccggaaatgcgatccatccaagcttcgccgaaaaataaaccagggcatacaaaaagcccggcagcatacagatcgcatagggaactgcataggaaagcttcttcttcagcaccattaccggaaggatcgccgtactgactactgccggataaataatggaagagccggaaaacgtcagcgcactgactgcagcaatgaaaagcagcacccagctctctttatttctgccatctttgttgagccagagccgtatacttaccagaagcgctgccggaatggaaatatttgccagcagggccttcccttcataaacccgcataaacgcaaaggttcctgttgtatagatagaaaaagaaaacaattgcatcagacacacaaaaagaaccatcaggtctgcttttttttcatctccacgaaaaaagctttttccgatctggtagatcagaagattgatcatcagcatgttgatcacagacatcacgaccttggactgaacgatcgggtggatgcccagaaggacacaccacaccgcattgttcatcggatatgcagaaagatcatagcggagattaaaatttctctggataacaccggtaagcggactgtatcgggcaagagtgtctgtatacacggaagtgcttactgcaccaatataatgtgttgcatctgcagtaacgtcctgatatgcagccaccagaaaacactgcaggatcactgccgcagcggtcaaaagcagtagcagtgaatgcttccgaaatgtttctcctatccggtccagctgtcccttccaaagtttatgcgcaaacagacatgctaccagtacacaggctgccatgatcaccatccacagatacgaaaaggtactcagttttacccatttcagggtcataggaactgcaagtatctcaaaaaccgcaaaatacagaagatatcccaagaccagttccatggttacttccgccttcattttcagtatccgtgtcagcagacttcctgcacagaaaaataccagcagctccaggatcagtccggcaattgccagtatcagctcctgcatttcacaccttctctccggcttctctggcaaggattcccattgcaaccttctccggagtgatcgggagctctctgacacgtacacctgttgcattataaaccgcattggcaatagccggacaaggtgtatcgatcacaagctcaccaatggattttgcaccgaaaggacctgtcttctcgtagctgctctcaaactcgatccgcaccttcggaatatccatacggttggggatcttatactgcataaaagaattgttacggatctttcccttatctgtatactgcacatcctcatacagaaccattccgattccctgaccgataccgccttctgcctgcactctggcaagatttggattgatcggagttccacagtcgatcacgcccacataatcaatgacatcaatctgtccggtctctttatcgacctccacttcagcggcacctaccataaacggtggcggagagatcggagaagaatattcttttacaacctgaagctcactgcagactccacaggtcgcttttcctgcgatctgctgcagcgttacctcttttccgtcttctgtgcggactttttctccgtcaaaatcagaatcctctgcagatactccaagcatctgtgcgccaaaagcgtggattctctttctgagttctccgcaggcctggatcacggcatttccggttgcataggttgtggaagatgcataagaaccggaatcatagggagaaatatctgtatccacactgaataccacgatatttttcatatctgtatccagacagtctgctgccatctgagcaagaatggtatcacatccggttcccatatcagaacatccaagtgccagggtataggaaccatcctcatttaatttaatgtctgctccgccgacatcgatccctgcaatagatgagccctgcatagccatagcgataccgacaccccgtactttgccgttacccatatcacggaacggatatttctcatcccatccgatcatttcctttgcacgggcgaggcatttatccatggtacagctgccgttgatcggtacatccggatatcctggaagtgcctctccctccataggcatgttcagctcacggaattttactggatccatccccatcttatgagccagctcatctgctgcggactccacagcaaaaataccctgtgtggcaccatagccacgataagcgccagctgcctgcatattggtgtaaacaacatcataagcaaaacggtaggcttccgtatgacgatacagcgcaatggatttatggcctgaaagtcctacagttgtaggcccatgctctccataggcaccggtgttggaaagagtataaagatcgattgcctttacaataccgttttcgtctgcacccatacggatatggacttccatctcatgacgcggagaagacgcgatcatggattcctttctggaaaaaacgatcttggacggacgcccggtaacccatgttaccagtgccgggaaaacctcactgacagaagactgttttgcaccaaagcccccgccgatacgaggcttgatcacacgaactttggaagacggaatgttcagcgcatttcctacgatccttcggatatggaacgggatctgggtggaagaaaccaccgtcagtctctgaaaatggtccatataacagtaggtacggaaggtctccatcatggtctgctgatttgcctttgtgtggtaaacctggtctactgtatacgcacatttttccagcatggcatccacatcacccacttcttctacattggaggaacagagattacgcttattatctccgccggccgggatcggcatataccagtcatcctccgggtgcaccagaatgggattatccttggctgtgtggatatccagaactgcttcctccacacgatattttaccttaatgcgtttcagggctttatctactgcctcttctgtctcaccggctacgatggcaaccggatcccctacaaaacgcacatgcttatctatgatatagcgatcccatggactgatctcaggcgctgtctgcccggccagggtaaatcttttgtgggaaacatcctcataggtcagaacacaggcaatcccctcgatcttctttgcagcatctgtcttgatctcttccacccaggcattagcatgaggacttcttaagatcttgacgatcaggcagtcagaaggtgcaagatcatcggtatagaccggttttccggttaccagcgacattgcatctgtttttggcaccggcttgtttacgtatttcattttccttcctcctgtccttttttatagtcgagaaatttcaggatacttctggtctgtcccacaaatcccgagcaacggcacagatttccggaaagatactccaggatatcctcttctgtgggatcttccagttcctttaacatggcaaatacattcatgataaatcccggattgcagaagccacactgctctgctccctcatttgccataaaagcgccgaattcctttgcttcctcctgcattccctccagagtcacgatccgtttcccgtctgcgcgggcagccagcatggagcaggacagtaccggacgttcatccatcagcacagtacagagaccacagtttgcagtctcacagccacgttttacgctgtaacagctgtttttccgcaggaaatccagaagcagttcatccggacgtacctctgcctgccgttttacaccattcagccagaaagtgatattcattctgctctccctccgatctcttcccaggctcttcttgtaaggactttcacaagaagacttctgtattcttttgaagcacgcatgttcttgtctgtagaaacatgttccgccgcatatgcggcaaaagatgctgctgcatcctttttctgctgtgcattcatctgtacaaaatcttttaagatttcctcttcatcttccacgatcattgcttttccgggtctggccccaatgacagttcttgcttttccgccaataagagcggccgcacaggtgagcacaggaaaatctgtggaattgttccgctgacttaagtacacactgttcagcggctgtttttttacaatgatatttaccaggatatcgttatccttttccatggatgcaaactgtgccagcggaatggttccgccattgtacagctccacccaggtatccagtgctagaaacatggtcagtacatcggaaaatccgaatcttccgaaaatacttccgcccactgtggcacagtttcgaaactgcacacccacaatgtgccgtacactttcacggatagcactgtttgtataggcattcagctctttgtgggtttccagcgcatgaagtggtgtcatacagccgattacaaatgcttcttctgtttctgtaatagtatccagcccaagacctgacagatcaatggctgtcatgatgttccggtttcccattttcagccagaccataccgcccagcacacaggctgttcttttctggttcagttcatatgcctgttcaaggctttctgcctttacgtaattctttatcttcagcatactttattcccttctgaattctcattctctttctttacggctgttttttcagccgaacatttattttaacagactgtcagctaaatagctattgtttttttctctgctgttctgacgccgcattagacagcggtctccagaacgataaactgatacggtttcaaaatgatctctttttctgtgatctccacagctttctgattattcagaagcacctcttttacttctcccggcaaagataccttctgtgactgtgcctgcatatttcccaggatcagaagatttttctcaccgtttcttgtatatgcgatcagattcttctgttcttcctgatatggagcgaatgttccgtatacaagcgtttctttatattccggagcttttctcagtgcagtcagctttttgtagaaagaaaggagggaatcactgtccgttaactgggactttacattgatctccttataattgggattgaccccaagccacggctctccttctgaaaatcccgcatttttctctgcgctccactgtaccggagttctggcattgtctctggaaaatgcggaagcagcatcaagcgcttctttttcactgcatccggcacggagcgctacctggtattcatcaatggtactgatgtcatcgatctgatccatagaagtaaactccatattttccataccaatctcctgaccctgataaataaacggaattcccttcagcagaaaataaacacctgccaggagcttccttgaatccggacagcggtcttccggagaaatatagtgacagacacctcttggctcatcatgattctcaataatgttggagatcatgccggtatccccaatctttttctgcgtatggaaaatacacttcttgtactcttccggagtcaggtacggtttggatgcataccagccatcctcgctctttccgtaacaggtttcttcaaaatcaaacatggatgaaaaatatccgttttctccgataaaatctttgatctcatcttccttttcattgaagacctctcctacagtaaaagcatcatagggatgaaagcacttctcagccatctctcccagaaattctccaatcccttctgcctcctccagcatcctcccgacgctgcagagcccatctgcacgatcggcaggataatcggaaaacggaagcttcttcttgatattgataatggcatcaatacggaatccgccaagccctttttccatccaccagcggatgtttttgtagacttcctctcttacttcaggattctcccagttgagatccggctgcttcttgtggaatacatggagatactgtttatccggatgtcccggaagctcttcccataccggaccaccgaaatagcttctccagttgcagggaactttatcatcctttttgtcccggatataaaagaaatttccatactttccgtccggatccttaatggcctgctgaaaccactcatgctcatcggagcagtgatttaccaccagatccataaggatgtacatttctcttttttttgcttctgcgatcagacgatccatatcctccatggtcccaaacctcggatcaatcgcataataatctgcaatgtcatatccctggtctgcaaggggagatttatagattggggaaagccagaggatatctgctcccagttccttaagataatcaagcttgctgatgattcccgggatgtctccgatcccgtctccgttggaatcataaaagctcttggggtatatctgatataccactttgtcatgccaccattttcgtttcatcgtaattcctcctatgcctgtttgatcatgcagtactgcttcagatcaaatccttttttctgtacaatgccgtataatttaaatccgaatttctcatacatggaaacatttgccggattatgggtttccagagagatcatcagcttatgcctgtccgcataatcgatcacctcatccatcagcttttcagcaagaccgtgatgctgcatcttcggcgccactgccagatagatcacatgaagcctttctgctgtatgaagctgggaagtccagctggaattcagatagtcttttccctggatgaatttccgcagggtcgcaagacttggatcctctttgatcagatagccatctgttttcagaagggcaaaaaaatccaccatcagattatgtaaggctgcttcatgctccgttccgtcggatactaccaggatactgttcaactcactgctgtctgcataaatctcgcaggtctcaaaaaactccgtaagatcacaggtaaaaagctccggcatcagccgttctctggtatccctgtccgggatcagtgcatgatacagaggatcctccgaaaaacatacggtcaatatccggatcagcttatccagatcttcttctttcactcggtataaattatggctttccattctttcctccaggtatggttttattctgttcctttttcaaacatatcactgacctcgcagatcagattcctgagcttttccgctgcacggatcagatattcaatatcatcggcataataacgcttctgtctttcccaggcttccttgaggctctgcttttccgcctccagactgtcacccggcttcttttccttcagcctttccacaagatcataaaggttctcatgatggatgatcctgccctttccccacatcaggcgatccggggactgcttcaagatatattccgtaaaatgataaaagacttcccgctcaaactgaaaggcataacagttgttgtcaatactgtaaaaagcctccagcgcaggtgcgatctctcctttttccagatatcccatcgctttcttcagtgcataaagattgttctgcactgcctgctgcggaaagatcacattgtcatcccagtccagacgtaccagataatcctgggattttcggaatacaccgagaagcttttcggtaatggcatcggcttttttccagtcacgtttttcttccggaaggctgttgaagtgccgtacctgctctgcaaggatggcagccgctttttttgcctcttctgtttttttcagaaggagtgtactgtcggcgccggtctgcatacacagatccgtatccagggtcttaatactttggtccagtacccgcccgaaatccattggcggcagagcaaggctgtcaatagccagaagaagtttcagataaaattcatgatggaatctgtatacctcttcctcataaacatcctggttatcgtattgggaatgataataattttccataaacgggccaccgctgaaatcattgaccatggacgggatcccggaaatagccatggtaaaatcatcagaccaggtttcaatgggatacaacgtggtcatgccctccggataaatcccctccggcatctgcacagcatccacgaagctgcgcacaaaatccgcatactcataggtacatcgtactgcatctctggtactgtgtgcatgagccggaagctcaaaattcagatctgcgatcacgtgcccctgccactccggtctcgcctcaaatacctggcggtaagcacctgtggaccagtcatattttgtgtcggaaatcccccattcttctgctgcaagagcacataccacaatagtatggcgaggtttatagccaccacggagcagcgccctggcaattccaatgatcatggccactgccgcattatcgtcctgaaatccctcaaaataggaatcatagtgagcacttaacaggattatggaatccgaatcggttcccgggattttgccaacgatattgtaggtatactggtctttgatcacctctgtgtccgcatcaaattccacggaaagctccggaacacgattcccattctcatttttttcctccatcagctgacggatcataagaaaatctgcccgtgacatggaaaatgcaggcgcacaggaaggtcctgcgatatcctgtgcattcaaagccgtatcatcgatctgtgcgtatcctctgctctgtacggcgatcagagctgctgcacccttcaggtgtgcctgatacaccgggtagttgatccaccattcttctctctgattgatctcgataagaaccagctttcctttcacatcgatatccttatattcgtcagctgtaccctttccaagatatacaagatcaaacctctgaaagccattggtcttaaaatccgtctgatatgctccaagctggatctcccggcagattccctctctgtcatggcagcgcatcacagcttttttaaattcccatgcatccacacggatcttatctttttctacctgtgtgagaccggcttttttcatttcttccaaaagcatatctccggtttttcgctctgccagggagcctgctgtacggtatcccagaaccggatttgttttttcctgttccatgcgcctggccagctcataagattcttttatattcaggcatgaaacacatttctccacgatgttcaaatttactgtcatccctttctcggcagttccctgctggcagttccatcctcccggcagagatattcctctaactgttatagattataccttatcaatgtgcggatttccagataaaaaaacgcgatttgttctgacaaaaaatccatctcacaaatcacgttattataatttctttttagccggaataccgaagcgcatcaataggcttcctggatgctgccttgttagccggatacaggccaaaaagcacaccgatcatcagagacatggtgttggtgacaccggacatggcttccatgatctctgactgatccacaatggaaaaagcgtcttcgtcctgctcaaagcgttccatcaggagctctgtaaacgcattttctgccagatccagattaccggtacccacaattgtcttggaaaggttcccttttttcgcctccaccgattacgttttcgctgctgttttctgcgccggcttcgtatgcgccactttaaaatatcccacagttcccgcacctgccacgcagacagccgccaccgggatgatcaccataagccttttacgccgtcgtttcattttccttaacctcaaaatatgctgtgtatgttctctctgttttaaaaatactttaactaagacttcccacaccaataaagtgtgttgaaccttgaaaattcaatatttcagccaataaaaaggcataaatacgttccatttgctataatgaaattgccaaaaaccattttcgcaaaggagatttatgccatgtccattatagcacagaacaacactaacgagatagctctacttgactgtatccagagatttttttcaaaacaccatattggaaaactactggctaaatgcaatggcacgaaagaaaaaggtgtccctgccatttctcttttgaggtataagcttggaaatattttcgtagggcgaagtatgtatatgcagcaacgcagtggatccttcaaggaaggattctctaaaaataccttttaccgtttcctgaattccacaaagacaaactggcttcgtttcacttctcttcttgcggcagatattgtcaacaatgatctgaagaatcttacagatcaaaagcgcaccaatgtctttattgtagatgacagccttttcaaccgatccagctgtaaaaagacagaattgggatcccgtgtttttgatcatacagatatgacctataaaaagggataccgtatgcttacactcagttggagtgacgggaataccctgatcccggttaacagctgtctggtcgcatcttcaaaagagtccaatgtcatcgggcctgttcatacatttgataagcggaccattgccggaaagcgcagaaagctggctcagaccaaagcacctgaagtaatgctcacgcttcttgatactgctacatcttccggattatcagcggactatgtcctgttcgactgctggtttgccaatccggcacagatcacagccattaaatccagaaacatggatgtcattgccatgatcaagaaaagcagccggatcaagtacggatacaagggtgaacagcttaacatcaaggaaatctattccagaaacaagaagcgccgcggcagatcgaaatacctgctttccgttgatatcatgctcgggaaagagaaccctttcccggcaaaaatcgtatgtgtgcgaaacaaggcgaatcgcaaagactggcttgcgttcctctgcacagatccggatctttctgaagaagagatcatccgtatttatggcaagcgctggcagattgaagtattcttcaaaacctgcaaatccatgctgaatctgatcggggaatgccacagcctttcctatgatgcactgactgctcataccgcaattgtttttaccagatatatgttacttgctctggagcaacgtcaaaacgaagaccagagaacgcttggagaactgttcttcttcctggtggatgaaatggcggatattagcttttcaagatctctttgcattctgatggatgctttcatggcaagtcttcaggagatattaaagctcagcgagaatcagctggcagcatttactgctgattttgaagctcgtctgcccgaatatctgaggagcgtgctccatcctgtggctatagtagcataaatcgctattttgttagctgaaatattgaattttcaaggtgcgaagcctatttaaggtatgggaagtcttagtactttaaaagaaaaatgcataaagactttgtgtgatctgtgaaaacccggtgaaaaaggcatcctgtttttcatatacaaatacaaataattaattatattttctgtctgctgccattattttttgtatatattaaatattattttaaaaattatatattattttctggtattttttaccgaaatatgttataaaagaagtaagaaaaactaccgaaaatcagatattcctgctttcggtccgaaataaaggaggtatctttatggcaaaacgtattatcaccatcaatcgtatgtttggaagcaacggacgccttatcggcaagactctggctgaaaacctggacatcggtttttatgataaagaactgatcgacatggctgccaagaaaaacaatatccccttcgacaccctggcaaaggtagacgagaaaaaagccagtcagtgggtatttcccgttgacagtgagctgcagtttacagataatttctcttttgtaccaatgaacgatgtgctctatgatctccagagaaagatcatcctgtcccttccgcagagagaggactgcgtaattgtcggccgctgtgcgaccaatatcctgaaggataaatcacttaaactttttatccatgcaccttttgaggaaagagttcagaatgtgatacgccgtaccggcagagaagaagccagcgcacggaagctggtcaaaaaaatggataaagagagaaaggcttactatgaatactttacagacagcaaatggctggatatgacacagtatgatctctgtattgacagcagccggttttctatggagcagattattgagattgtaaagagatgtctttaggattctttttttctgaaaattttttctaaaaaatgtttttacgctttggaagcgtaagtgaaaccgcaggggaggggaagcactcatagttgcgaaaggccgtttcccctcccctgcaccccttccctctggccccgctatgaaccgtacgttttgattatgttacgctgttgacagggtgatggattctgcgtttgtttaaaacgccaggctgtgccgatctcatcggcataacacctttcaacaagaagacgtatccttcccactattccaacacattgagcaacaccaaaatatttattgaccagacgctatccttcccacacttccaactcattgtacaacactgaaatattaactactaagacttcccataccttaaataggcttcgcaccttgaaaattcaatatttcagctaacaaaatagcgatttatgctactatagccacaggatggagcacgctcctcagatattcgggcagacgagcttcaaaatcagcagtaaatgctgccagctgattctcgctgagctttaatatctcctgaagacttgccatgaaagcatccatcagaatgcaaagagatcttgaaaagctaatatccgccatttcatccaccaggaagaagaacagttctccaagcgttctctggtcttcgttttgacgttgctccagagcaagtaacatatatctggtaaaaacaattgcggtatgagcagtcagtgcatcataggaaaggctgtggcattccccgatcagattcagcatggatttgcaggttttgaagaatacttcaatctgccagcgcttgccataaatacggatgatctcttcttcagaaagatccggatctgtgcagaggaacgcaagccagtctttgcgattcgccttgtttcgcacacatacgatttttgccgggaaagggttctctttcccgagcatgatatcaacggaaagcaggtatttcgatctgccgcggcgcttcttgtttctggaatagatttccttgatgttaagctgttcacccttgtatccgtacttgatccggctgcttttcttgatcatggcaatgacatccatgtttctggatttaatggctgtgatctgtgccggattggcaaaccagcagtcgaacaggacatagtccgctgataatccggaagatgtagcagtatcaagaagcgtgagcattacttcaggtgctttggtctgagccagctttctgcgctttccggcaatggtccgcttatcaaatgtatgaacaggcccgatgacattggactcttttgaagatgcgaccagacagctgttaaccgggatcagggtattcccgtcactccaactgagtgtaagcatacggtatccctttttataggtcatatctgtatgatcaaaaacacgggatcccaattctgtctttttacagctggatcggttgaaaaggctgtcatctacaataaagacattggtgcgcttttgatctgtaagattcttcagatcattgttgacaatatctgccgcaagaagagaagtgaaacgaagccagtttgtctttgtggaattcaggaaacggtaaaaggtatttttagagaatccttccttgaaggatccactgcgttgctgcatatacatacttcgccctacgaaaatatttccaagcttatacctcaaaagagaaatggcagggacacctttttctttcgtgccattgcatttagccagtagttttccaatatggtgttttgaaaaaaatctctggatacagtcaagtagagctatctcgttagtgttgttctgtgctataatggacatggcataaatctcctttgcgaaaatggtttttggcaatttcattatagcaaatggaacgtatttatgcctttttattggctgaaatattgaattttcaaggttcaacacactttattggtgtgggaagtcttagttaactattaatttttcaacaagcaacatattcttcccacacctccaactgcggacgctcaactcatcaaaacgtaaggacaggacaccacgcgtccgcttccacctctccggctgacgttcaccaatatactctttcaaaaactcatatatatccccctccaacggcggacacccctccacataattctgaaacttacaggtacagtgtcccacaccaagcactcccgtcttaccacgatacccctgtccgatgcagatcttctcatccagcttctcaaaaagcccctcttccttcagcatctccaatgccgggatcagatacccgtagcaggcactgcaggattccacttcctctacggcatccgcaagctccacaacctttctggatatcggcatcctctgatccgcaccatcctccagaaatctgacatctgctttggaaatatctgagcagcccacgccaagctcacctgccagcttcacataaggaacctcagctacctcataatgcatcatctgacacacatacgcatccacaagaaccggatcacaggcagccatcacccggttcatcacgacaggatttccgccatcctcaaaatccagatccccgcagatattatccacaacaataaagtcctgctgtatccccatattcagatgagcaatgggtttatgaagccccagagaatgaaaacgtctcttttccttatttgggatcaaccccttcatattcttaagggcacaggtgatctttgtctgacaatggcctttcaaaaccggcacattgatcagaaaatcaatctcctttacccgctcgcagacattcagctccattccgccgcagtccacagaaatacccttatccttctgcatatcccagaacggcacctgatactcttcctcaagcctgtcaaagccacaggtctcaaaggcctcccttgtcttatctcctacccaggatccctccagcatcaccatatcccggaagccatgctccttcagatactcgataattcctgcaaccacttccggatgagtcgttgcaccccaggaagcctctgaaggagaaaccagattcggcttgatcccgatctttttctttctgtccccgatatgagattgaagatccgctttttccagaagctcctttgtcattcttttatattccgtaccactggtaataaaaatctgatttttatccataattatcaaaattcctttctttctgcaatgtgaatgttgatccagatccacaccaaagccctgcaaagcttttatcatcagatgagccagacaaaacagccgacaaatacagcagtcatcacatgcatcacaatcataaaaaataccctctctaccggtttcccggtaaaaaggatattttatccgacacagcagtctcgtattatctttcgatctttgccccgttccaccatgggaattctcggttcagccattttcctgcaagctcactccatggttcacaggctcttgcgattcctctgccgttttcgttggcagtcagctcatttgccaggccgatcccatggggtccctgcggaaaaacatgatactccactggaatgccctttttatagagtgcctgaacaaagagaagtgtattatccagcagcaccgtctgatcctcaaaggtatgccagataaaggttctgggtgtatcttccgtaacctgaaattccagagacatccgatctttcagctcctcataacgatctcccagaagatttcgaaagctttcttcatgaccaacttcccctgaagtgatcaccggataattcaggatcatgccattgggacggatcctctcgttttccattcccgtgatccctgcaagctcctccgtattccagaatactcccagagaagctgccagatggcctcctgccgaaaaaccggacacaatgatcttattcttttcaatatgccacttatcgctgttctctctgagaagagctactgtttttgccagctgacggagagccaccggatatctggcaggtgccacactataacgaagtaccactgtgtgatagcccattcccataaaccggacagcaatggcttctgcctctctgtcagaagtcatgccataagctccgcccggacagatcaccatgaccggacgcttctgtcccggatagagttcttccgactcctgccagaaataggtctctatccatgcctcattatagtcctttgttttttcttcgatcacaattctttcgttgatcattccgactttcccttcttcatttcattgcttctctgatcgctgcaagaagttcatcgtactcttcgtaagccggaatttccggatgatctgcacggatctgctctgtgctgcggaaaaggaatcctgctttgcttgcctggatcattccgagatcattgtaggaatctccgcttgcgatagtctcaaatcccatggactgcagtgccttcacagttgtcagcttagatttctcacagcgcatcttaaagcctgtgatctctccgttctctgctacttccagggaattacagaaaagtgtcggccgtccaagcttctccatcagcggagttgcaaactgtgtaaaggtatcactgatcagtatcacctgggaaaaagatctcagctcatccagaaattcctttgctcccggaaggggatcgatctttgcaatagtctcctggatctctttcaatcccagaccatgctctttcagaattccaagtctccagttcatcagcttatcataatccggctcatcacgggttgttctcttgagctccgggattccgcttgcctctgcaaatgcgatccagatctccggtaccagtacaccttctacgtccagacatgtaatatacatctttcatatcctcctcttgatccaacttaccgttgatatttcacagagtctgactccttccggctgtcagaactctttaatcttttagcgctttaccctgatattaccatatgctctcaaggtctgtaaacagttttattttttcttcttttccgcttcatagatcttcagctctttcagtgctttttccccaagaggatacagcatgaaaatattaaagatcgtcatcaggccgattcctacatctcccagatcccatacaaatgtgtaagccgcgatcccaccgataaacagcatcaccagtgccagcaccttatatcctgtctgtgaaccccagttatcaccaaaaagataagccacattgcctcttgcataaaacaggattcccaggaatgtggaaaagctgaacataaacagtgttgcagcaataaagatcactccaaactgccccatatgataatgcatggcagtctgaagaagttccattccggaaagtccctgtaccagatcttccggggccagaagcatgatcatagctgtacagctgcagatcacgatcgtatccacaaatacacccagggcctggacaaatccggcttttaccggactgtcacattctgctgccgctgctgcacagggagcggagccgcttcccgcctcattggaaaaaaggcctctttttactccgttcatcagcacgacgccaaatccgccggcaacagcctgacgaaatccgaaagcttcttcaaaaatccgtttaaatactcccggcatacttccaagatttgtaaatataataaacagcgtgatcacaaaataaagcactgccatcaccggcaccagaagatccagaactttaaccgttgcattcttccgaagcacgatcacagctgcgatcactaccagcacgatggtagtatacagcggcggaatatcaaaagcatttttgaaagacgccgtgacggaattgctgataacctgaccgatcccacaccagcagatcaggccggaaatggcaaacagaacggaaagcagaaccttttttcgttttctgccctgtttttcttcccagtaacggtggatatagtaggcaggaccgcccctgtagccaccatatagaggatccttttctttatagagctgtgccagggtcgcttcgataaaagcagtggaggaaccgatcagcgccgtgatccacatccagaataccgctcctgcacctcctgccgaaatcgcagctaccacaccgaccaggtttcccattcccacacgggtagctgtagatacgatcagcgtctgaaatgctgaaagattatttttgtcacttttcttttctgacagggctcgtaccatatccggaaaaagacggattggcagaagctttgtcctgatggtaaaatagataccggtcggaatcagaagcaggatcagaagtgagattcccagcgtacttcctcccggaagcgggatccttatcagatctccccacagaaatgtatagaccttttcgatcattgttactatcatgttactgtttcctttccccaatcaccccatgtgatcgttttgttctctttttctgcccgttgtttgtatttatttctgcaacgttttaaacgggcaaagcgtgtctttcattataatagctttctgtttgtatgtaaagaaaaatcccgaatctttcgatccggaatttttttgtattggtaacttttctgttattcgacagatttctgatatctgtctatttttatgagcatagctgcattttactctcagccagccaggtggaacatctcgatcaggaatatccagctcattccatagtatgttatcacggctacaaggtcattcatcgtagtgatcagaggacctgaggctactgccgggtccacaccaacctttttgaaaaacagcggtatgcaggttcctactgcactggataccagcatggccaccagcagagataatccgatacagccggataccgcataggcaaatacgagtgtttttcctttgaataagaaaatatacaatccgatcagtacaaaagacagaataccgagcagaccaccgttgcaaagaccgatccgcatttccttcagcacaagctctgctttctgtctgcccgtcagcgtttcatccatcagtacacggatggttacagccagggactgggttccaacatttcctgccatatccaggatcagagactgaaagcacatgatgatcggcagacaggtaactactttttcaaacattcccacaacagaagataccaccataccaaggcccagaagaacgatcagccagggcattctttttttcatgctttcaaaaagaggttctttcagatcttcctctgcagtcagaccagccagctttgcataatcctctcccatctcatcgtctaccagatcgatgatccctgcggatgtgatcactccaaggaaacgattgtcatcgtccaatacaggaatggaatcttcagaataatccttcagccgttccatacagtcgtcgatctgctcagtaccatacacatatggataggaagttacgatcagctcttccatagggtggtcctgtcttgctgtgatcagatccttcagatccagggctccataaaactcccctctgtccgtcactgcaaagatcgtagaaatattatcattatctgccgcctgggaaatcagctcactcatggcctgctttacggtcagattttcacggatcacaatgcagttcgttgtcattctgcttccgatctcatcctcatcaaaggagcggatcatttcaatatctttccgcacctgttcatccagaagctggatcagaagcttgcgtttttctttatcgatctgctttaaaacatctgccagagcatcggtttccattttggaaagaatggctgccgctttttttacatccatctcttccagatattgtacagtttcttcttcctccagatactcaaaaacatctgccagcatactgctttccaggatacggtatagtctgcttcgctccgcagtgcttaattctcttaatacttccgccagatcgttttcgtggaaatcctgcagcctttcacttaaaactgccggagaaacactgcttcggatcagactcagaatatcttttgaaaaatcctgattcctttttgtcattttctcatcctcctcacatagtttcgcacaaaacacgcacaccaaaaacagacatgttaaagcatgtctatgtgctgtttgattttcgattgtgtttccttgggatttgagtataaagcgaaatgaatttatacatgatcgccttactgtaagattctcagaatgagaagaatgaaaaagatatctattataatcctgctacaattataatgtaataataccgtacagattctggtgtcacctatatatcctgtcatatatatccttctgatatacagacataatattcccacagatattctgtacacttaaaacagaatggaacagcctcatccctctctgttttttccatctttcactccgagagctacaacttcgcccatgagaatcacaactgtccattctgttcacctgccttttttcttaaaatatcttatcaacccggccattataacgttcccggccgggttttgtcaaccggatttatggttaaatttattgtaaatccggttgaaattttatgttttacagaggtggatgtttatgcagcagcatttgcgttgatcgtatcaatgactttttttattccaagccaaacacccatatctgtaaagatttccgaaatgctcccacgatccgtaaacggagattccagcaaaacagaaagatccttcatcattccattatgaacaatatactcaatgatctgatttacaaaataaatctgcctgctgtccagatttacatcctcaagatactttgaaaaagcttcctttgctgcattcatatcaagacctaccatttctctgacaaattctcccaatggctttctgccaaattctgcttcataatcctcttttgtaccaagctctctccagagaattttttccagttcagctacatctttttctgtaagtgactgattctttttcagcttagctattacatggttatcctgatgctgtcggacataatattctactcgtactttataattttccagatcatcgttttccaattctgcttctttccattccgttgaaagaatttcgtctgtaaaattggtcatatatttattcctgctcttatccggaatatacttcataagatctctcagatttttcctgatattttcaaattcatcaattcctgcattttccacataatctgtatgcaaaatctgatcgatcagctctgtctgtgcctgaatctccggtatatttgccactccggcaattccggaaaccttttttaaaagatcttttcgcgcacttgtatatttctttccaaccagagatgcaagttctattccatacataagtgcatcaaaacgtactgctgttacttcatcactttcaggcaaaatcaagggtgcaacctcttcccgtacaagtaaagtatcttcataagtaagcatctgatagttcgactcttctgaatataattctacatatttcaaatgttggcgaactgtaaaactatctcttgggagctcttttactttttcagtcatgtgctttacaagtgcagtcctgtacgcagttaatttatctttctgatatttaatatcctgaagcttgtacgaaatctcaaactgaagattaaaaactgcactttgcaacgccatcagatttgcgcttgcttttcctttattcattcggaaaaactcaaaatttccacaaaaatcaaaaatgtaaaactttttcttatcttccccatccaacaatcccgggcatagtcttgttcctcgtccgatcatctgccagaattttgctttactcataactttcttaaagaatacaagattaagaacttcaggtacatcaattcccgtatctaacatatctacagaaattgcgatctgcggtagttttttcggatctgaaaactcatcaattgcactctgtgcatatttcattctgttatcgatcaccatagcataattctttaaatgcggatattccttattaaaaatctcaaggatcttttccgcatgatcatgatttttcgcaaaaataattgtttttccaatcttctgtccgtattcaattttaattccatctctcatcaggacatgaagaatttttttaatggtatcttcgttaaaaatccaggtattcaatgcagccgaatttatcgcttccggaatctttccattttcgtcttcaaaagtattttcatagatttctttatctgcttctgaaagttcatcatatacaattccctgatcaataaatttcaccctggattccaccgaaagataatcaaccagatatccatccttaaccgcctgcgccagatcatatccataagtgggatctccgtttgccagttcaaatacttcatatgtatttttgtcaatctcatcttttggtgttgcggtaagtcctacaagcagtgcatcaaaatatgtaaaaatatctttatatttattataaatggatctgtgcgcttcatcacaaatgatcagatcaaaatgaccactggtaaaaacttttccttctttgtcatttatcgtatcaatacagtttatcatggtctgatatgtggagaaaacacatcgcgacatataattattcttttcttcaaccagatttgtacaggaaaaatcctgcatccagtttacaaaacttcttttcgcctgtgttaccagtgaatttctgtccgccagaaaaagtatattctttacccagcccgcatcaaccagtaccttgcacaaagccattactgttctggtttttccggaacctgtggccataacaagcagggcttttctccgattcttttcatcaaagctctggcatactgcttttatcgcggcttcctgataatagcggtctgctatctttttatctacagaaatattttgcaggcttgtccgcatactcaaaaggttaaaccatttctccagatcccgtttggaataaataactgaacattttctttccggatattgtccgtctatgatccgggtttcaaaaccattggtaaggaaaattaccggacgccgttcatatttcttttccagcagatctgcgtaaagtttcgcctgctgcctgccctcagcaatatccttgcaggtacgttttgcttctataattgccagaggtttattcatatcatcatagagaacataatcaatacgtccaatccctgatttattcggcattcctgtcacagtcatctcatttaaccagtcttttccctgtgtccatcctgcatcaatgagcatggaatctatgtaaagttttctggtttcatattcagacagatccagaggtttcggaacatatgtctgctgctgtttctcgtggcgtgcggacagttcttccctgaggaaagtattttctgccatcagtttttgtagatccagttcctgctgagcagttttttcttgttctttcagaagtgtttcctttgcttttctggctgtttccctggatgcctttgccttctcaattctgccatcaataatcgacttgtcaaatggatgctcctgatactgttctccataacaatatgcaacgtaatctaaaaaaatcgacagattttcaagacacagcatcgctgcatctctgccaggttttttattgctatgtgccacactgtttccacatctgcggatataatccatccgtttccaaagatccggtcccactaactgtctgaattcctctgcattcatcagagtatgaagattatcctggtacggaatctgcaaactgttttccacagaatacaaccattttacagcaaattccatagcccggcggctgttaagaatactcgcatccggatctgctaatatgatcttctccgcagagatggcaacattcgcaaatgcagagaattttgattcattttttaaataatcaaagtttgttaccattgtgaaatctccctcttttactttcactttacattgacaataaattcattaccaaattaaccataatatctttttcttttggatctgactctgcaatcatcaatgtaattgctactaatgcaccatcacttatccttttctgtccatctttgtagagtacatcattgcgagctaaaaattccaaaaataacgatgcagcaattctcttacatccatcagcatagggatgatcttttatcataaaatacaaaagattagcggctttctcttctaaagaaggataaacctctcctccgaaaacattttggtaaattgctgcaagaataccttcaactttccccgtttctttttcaacaccaaagacatccgaatgaaatgaatcttccattgcattcaccatatttctacaatcctcgtatgtaattctgtatatagctttatttcctgcaggctttttaatcgactggtgatcatactggtctaataacatcaaggcatttgtatataaatcaacagcttttagcacctctgcttcatctatttccaaagtacatgcaagcattttggtttgaatatttactgttctctgtaaggcttctaatctttttttattgattgcatagccttgtaggatatactgtttcagaacattatttgcccattttctaaattctacacctctgttagatttgactctatagcctatagaaataatcatatctaaattataatgttctacttgatacacttttccatctgaagcagttgtcgcaaaatttgcgacaactgaattatccagttcttcttttaatgcattattaatatgtttaccaattgtctttacatctcttccaaataatttagctagctgattcctattaagccatacggtattatttttgacagacacagttaattttatttccttatcagcagtttcaaataagattatttcattttgcatatttaaccctcttctgaaaatataccattgtaaatttcattcccatcgcagtaagcaatttctctcatgtgtcttcataaaacatttcttttgctttatttcactttctcgattgtatcgtgacatatataattccattttctataaaagctgattgataaattttgatttgttgacttgtttgacgaagtcggaaaactgttcctgcaaatccatcggtggaataataaactctttttcctcaagcttcgatttagacaatatttgataaaagcattcatcaatagtccgtacactcatatcattcttcccacacaaacccgaatttgaataaaattcagctcataaatttctgatgagatgttttgacattgttttgattcaccatcgcatactgcatcgttgtatcaatttgtgaatgtcctaatattttttgcacctgttctattggcattcctttatctattgctctggttgccatggttcttcgaaatttatggggatgaatacgttccagatcaattctttttcctaattcccttaaacgaatttccactccgcttatttttaatctatcatgtggtgcatccagagttacaaataatgcagaattattatcttttcgatgagcaatgtattcttttaaatgcaccttcgcttttgcatcaaaatatacacgcctctctttgtctccctttccgtatacaatgcactcacgcccttccaaatcaatatcatcaacattcagatttaccagttcacctactcgtattcctgtagaatatagcaaatctataattgccagatccctaatttctttgcagttatccctgagtcgttcaatcccttcatctgtaataacgctttttactaccgttttagttttaatcttatgaatccgtttcataggactttttaaaatataatcttcttcctctaaccaggagaaaaagctggaaatatttcttcgaatgttatccaccgtaacatttgaacatttattatttttctgatattctgccaaatatgtccgtatttcttctgttgtaatcttccttacagatgtttcaatatgggataacaaatgttctaccgtaactttataatattgaatggttctttctgaacaaccttctatcttctttgcatccaaaaacatttcaagaaaatctgtattggatatttccattttatcagcttcattctctgcacatacttttaagattacttcctgaagttttttcatttgtgtaattgacagatattctgacatttcattcagtattttcactattttttcttccatgctggcatactcctttcaaaatataccagcatccttcaaccattttgtttatagcattttgttttctcggtacgattcaaatatatatgccggattttcgtaatatacactgctgttgtagttatcaatctttgcactgataaaggaattgtatacttttattaaagcatctacgattccaatattttcatctgcagcaaccatttttatcagccgcttatatacctttccaatgtcccaatgtgatgggatgctgtatttacactcacctacattgtcaaaatttccttcttgtattcctgcttcttcaataaaatcatcactgactctgtcaatgttgtcacaatggtaaatatctgccaggtcatagattttatcaattctctgctttccaagtttatttacaacgtctgcccgtgtattctttgttttcctggcaatgtaatcaatcaggctgcatgtgtaaaataaatcgttatcttttttgctttcccgtccttctcctatcactacaacttcccctttctatccaaagtactgttgcatgagactgtcgaataacttctgtgtttcatccagtgctttttgcactttaacttttgatttgttgacttgtttgacaaaaatctcaaattctctttgtacatctaaatctggattcatcacttcaactgtcctcactttttgtataccaaatgcagcttgcgaagtggaattctttgcttcagcaaattgtctttcgacaaaatctgattcaaatgagtacttcaagaaatacggatttactaattcactattaggttggaccaacactacattagcagataatgtatagtcattacgtgctggaacaaacactggattaccaatagttccaatctttccaacaacaaaatctccgtcatgtaaagtatatctattcatatgttcttctaacactttaggactgacctttcgagcaccttcgaaatctattttacctgttttataatcgcaatccttgatacttacataagggattccaccttcttcaaccggtggtgttctatgacttggttgtgggtctactgaattagcaacttctccgacttgatgaatcggatatttagctgtaccatcaagcggattaccaaacagctcgacaaatcgggctttaataaggtcatccatcttccgaagttctcgctggcgatcttcaatcacttgattcactctattaagaatgtcaataacctcacattgttcagataaatcaggaacaataattttgatttttttcaaatctgccactgcaaaactcgcttgattaacagacttttttgttattcttccaatttgttctctaaacggctgagaataaaaacagtatctcgcataagctggtatgataatatctcttctagcctttagtccaagcaaattcataccatgaattatcttttcatcaccttgtttttcataaagtactgttcttcccaaatattgtgtactattaatatgcgacattaacaaatccccatcctgaagaacataattttcatatttttttatatcggtaattcctgcatatcccattctatcacggttaaatctgtcatttgcagtcgtttctatacgcgtaattggatatcctccatccactgctccctgctttatattggcaccgtttcgaatttgataaaagcattcatcaatagtccgtacactcatatcattcttcccacacaaacccgaattttcgaatctgccatcctttcttctataatcccaacaaccgttccagctcatccatttcttttccgatttccagctccagttcccggatattggccatgatttctgatgttggaggatattccactggggtgtattcaatttctttgtatttattgatactgagatcataatcattctccacaatatcttttttcggtaccataaatgactggtctgttcgtttccgttctgcttctttatcaagatttttgaaacgctctataatatccggaatgtcattctctgtgaccggagtacgtttatcgtccaaactgaatccgtctgctttcatatcgtagaaccatacctgatcagttccgccgtgttctgtttttgtaaaaataaggattgctgtggatactcctgcatagggtttgaatacaccggaaggcatggatattacagcttccagtctctgattttcaacaatttcttttcggatggatttatgtgcccgtgatgatccaaaaagtacaccatctggtacaatacaagcgcatctacctccaattttcataatcctcaaaaataaagcaaggaataaaagttctgttttctttgtcttacaaaccttaagaagatctccggaaacggactctgcatccaggcttcctttaaaaggtgggtttgccagcacaagagaatactgatctttatctgcattctgatcagataagctatcccgatattcaatataaggattttctattccgtgagtcatcatattcatgactccaatacgaagcatggtgcggtccatatcgtatccatggaacatatgattcatgtaatgatcttttttctgtttatcataaaaaatttcttcttttcttttttctttcagatattctcctgctgcaaccagaaatccggaggttccacatgccggatcacagataatctcatcactggacggatccatcatctcaaccatcatccggataatatgtcttggtgtacgaaactgtccatttcgtccggactgggctatttttgaaagaagatattcatatacatctcctctgacatctgctgtctggatttcattcataagtttgtaaatttcatccagagaatccaccactttggataaaaggagtggtgtcggaagcttaaatatcgcatcgtccatatatttggaatatgcactgtttttatcattatgaagattttttataaacggaaatacccattcctgcatgatcatatacattctgtctgccggaaaatcatggaatacggaccatttcagctgacttccgtcaattgtcctctcacctatttttacttctccggaaaaaatactctgaaatggcaagccaagcattgcactttctcttgcacgcatattatcggaatcatccagatcatgaataaacatcaggtatgtaatctgttcgattacttccagtggattgacaagtcctcctgccgcaaatatatcccataaaccatctattttgttttttaattcaccagtgatcattttttatctcccatctatcgctcattattccaggtatatttcgtataccttccgccgccgatttttaaaattttttctgttgtcagtaattctgccagtgttctctgtatcgttaccacactaatatccggacacttttctgcgatttccttttttgtaattgttcccagagtgttttttataatctcttctattcgctccggttttgatatattctgcgttatcagcaattttattcttgaagaaaactctctgtatgctcctacgataacgccaagcatatattttacaaatggtacataatcattcttattctcataccagttctcagaactttcccctaaacattcatagtataattcctttgaattttctatcattctctcgatactgatatattttcccacaatatagccggatctgtacaaaagtaacagtgtaagtaaacggctcattcttccattgccgtcattaaacggatgtatgcataggaaatccagaataaacatcggaatcaaaagaagtggatctatttctcctgttgccattgcctcttcaaatgctctgcatagttcttccattgcttccggtgtttcccatgccggtactggtttaaaccgtattttttttattccctgagaatcttcttcctcaatgacattatctgcagttttatatttccctccaatattgtaactttcaaatttatacaaatctctgtgaagctgtaaaataatcgcagactttggtgggatatggtcatggctttcatgaattgtattcaatacatctctgtatccggcaatttcctgttcatttcttgtccttggtcttgttttgtcttttaccaattcccgcaatctgatgtctgatgtataaataccttctattttgttggaactttccgtactttgaatcttggcgatttcaactaattgtgtaagagtatctgctttggcctcaataaaaagagtttgttctcctttaaattcatgtatctgtgtcaggtaagatacaatttcaggagtcaacagatttttccacttttcccgataatcaaactgtctcatatatttttcatcaccttctttatcactctttttggattttatttacttcaagtatataaatcaatcttatcattgtcaactttaatttgatcattttcgcaagaatgattaaattgaaagtgaaatgataaaattaaaaagcccaacaataaatgcttctgcacggatcttcagcatttactgtcggacttttatcctttttattcctttttgaaatatatcacaatatcacattttggggcaaaagattattctgcgtggtctttcaggtactctgcacgcccctcttcgtagaggttatttccctcgctgtcaatgatgactacaagcggcatgtcttccacataaagcttgcggagtgcttctgctccgaggtcttcgtaagcgataagctctgcttttttgatgcattttgcaagaagtgcacctgcaccgccgatggctccgaaatatacgccgtcatattttttcattgcatctacgacttccggaaggcgggcgccttttccgatcattcctctggcgcctacggacatcatggtcggtgcataagcatccatacggccgctggttgtagggcctgcggagccgatgacttcgcctggttttgccggagtcggacctacatagtaaatggtagcatctgtagggtcaaaaggaatcttttctccttttgcaagggcctcgcacattctcttgtgacctgcatcacgggatgtatagatagttcctgtcagtaaaacctggtcgcctgcatggagagttcttgccagctctcttgtcagaggcagtgtgatctttcttctttccatattaaagcacctccgttttatgacgtgttacatggcagttgatgttaactgcacatggcatacctgcgatatgagtaggcatagtctcaatgttcagaccgatagctgtggtctttccaccaaagccctgaggtccgataccaagcttgttgatcttctccagcatctctttttcaagatctgcatagtaaggatccgggttctctgtattcagaggacgcatcagcgctttctttgcaagaagtgcacatttgtcaaaagttcctccgataccaacaccaactaccataggcggacatgggttcggacctgcagtttctacagcctcaagaatgaaatccttgattccctgaaggcctgcagatggcttgaacatacggatctggctcatattctcgcttccgaagccttttggtcctacagttactttcacctgatctccaggaacgatctctgtatagatcatagccggtgtattgtcacctgtgtttccacggcgtaccggatccttgacaacggattttctcaggtaacctttatcgtatccgcggcgtacaccttcattgatggcatcatttaaatctccgcctgtaaagtggacatcctgaccaatttcaaggaatacgcatgccattccggtatcctgacagatcggaacattctcactgtccgcaatatcaaaattctcgataatgttatcaaggacaccttttgcgatctcgccgtcctcgcaggcacggcaggttttgatagcatccttcacatcttccgggagatgttcattggcttcgatacagagtttttcgataacctctgtaagtctgcttacttcgatttctctcataatagactcctttcgcttatctcatatgtttttattatcataacatatttttaacttaacgttcgtggcgggcatatttcggcagaagcataggagatacgtctcctgtatcaactcctgcatttttcagttcctcttcatattttctgatatgatccaggttcattgtgccaagctctacctctttgcatttggcagctgcttttttacctgcatttcgtccgaatacaattacatcaagaagagaatttcccatcagtcggtttcttccgtggattccgcctgctgcctctcctgcaaccagaaggttcgggatttcttttgtaaagccgtctccgttgatctcaagtccgccgttctgataatgaagggtcgggtagatcacgatcggaacttttctcatatcaatgccgtaattcatgtacatacggaacatggcagggatcctcttttcgatagttccctcaccgcccaggatctcgatcatcggagtatccagccatacaccttttcgtccacctggaacttcaacgccacggccttcctcacactcgcggataacaccagaagcatttacgtcacgggtttccagcggatggatataagcttctccgtttgcatttacaagctgtgcaccaacggaacgaaccttctctgttaccagggcaccaaggatctgtgccggatagatcgcacctgttggatgatactggatagaatcctggtaaagaagggaagcgcctgctctgtatccaagcacgagtccgtcagcagttgctccgtagtgattggaggtcgggaatccctgataatgcattcttcctgcaccaccggttgcaattacaactgtttttgctcttgcaacggaatagtctccggtttccatgttgagaagaactgcaccagcagtctgacctttttcatccttcagaagttctacagcggaggtaaattccactaccgggatcttaagatttaagacctcatcacggatagtacgcatgatctctgatccggaataatcctttgcagcatgcattctctttctggaggtaccgccgccatgtgtagtgaccatggttccgtcttctgctttatcaaactcaacaccaaggtcgttgagccatttgatcgcatccggggcttccattaccagtctttttaccagctccggttttgctgcaaaatgtccgcctccaaagcagtccagataatgctgtaccggggaatcattttctttatctgctgcctggatcccgccttctgccatcatggtgttggcatcaccgatacggagttttgtaacgatcataacgttggcacctgcgttgtgggcctcgatggcacaggaagagcctgctccgccaccgccgatgatcagtacatctacatcataatcgatttttgtaagatcgattttttcgttgagcagacggctttctgaatggagcatttttgtcagttccagtggtgctttctgtcccttgttcggtcctaccttgatctctgcaaatgcatccgggttataatccggatggaattttttgagaagagcatctttctcatctgcactcagacgtcttggctctgttgccatacgctccgctcttgtagcctctacctttttgatggattccatcatattttctggatatggtgcatacatgttttacgccctcctacttctcgatttctctgctgttgtaaagttcctgcatctctgtgatcggcttctgcatgatcttctcgatcatatcatcaaatttgccctcgtggatctcttccacacgtttctccagatgctcgcttttcggcgcaatatattttccggtgagacgtcttgccagaagacctaccatcggatgggaaattcctgccggacatcttacggaacagcagccgcagcttacacagtcaaaggattcctctgcacatttttcaagctcgcctctctgcgcatatgcaatatactgcatgacatttaagtcctgtgtacaggcctttgtgcaggcattgcatccgatgcagctgtagatctccggataaagctccatcattacctgctggttcggcttaagatcttctatattataaagtctcttgtctgtagggaagaacgggatacttgccacatacattccctcctgcacctgtgtctgacaggcgagacaggttttcagctcattctgtcccttgatcctgtagatggtcgcgcaggcaccgcagaatccgtgtctgcagccgcatcctctttttaatgtataaccggcatattccatagctgtcataatggtcagatcaccgggaacgctgtattttttaccgaaaaaatatacgtttaccatattattttccatgttggtgtcctttcttttatccaaatcgtacgccatgtggaacagccatctcacacgtgcccgtcgcaacgctctgctgaactaagtactaactgcgactaaggagttcaggagagccttcactcctaagtcttcgtaagtactggatttcagcgccgctaaaaccgctcctaaaatgggcatcttagcgagatggctgttccacatggctgtgtactggctataaccagcgcatatatttgaaagtttcttaaggtgcaatctataacttagtactcattaggtaattcatcaacctcatcacatcggaataccgggccgtctttgcagacgtatttgtctccgatgttgcagcggccgcattttccgacaccgcatttcatacgaagctccagtgtggtatatacctgatctctggagaatcccagctcttccagtcctgccagaacgaatttgatcatgatcggcgggccgcagaccagagcggtcttattggtatcaaaaccaatctccttcagataattcggaacaaatcctacatgaccgtcccagccttcctgctcgcggtcaatggtaagatatacatttacaccttctgttttcatccatacttcctggatttccttaagctgcaccagatcatctgcggaacgggaaccatagagaatatctactgttccgtaatcctcacggttatccagcacataattgatcacagaacgaagaggtgccagaccgattccacctgcgatgaacaggagattttttccctttaacttatcttccaccggaaaatgatttccgtatggtccgcggactgcaatctcatctccaacctgaaggctgtggagatgatcggtaagggatccgcattttttgatactgaattcctgataatcctttacagtcggagaagaagtaatggaaaacataccttcactgacgcctggtgcacagaccatggcacactgtcctggcatatgctcgaaaagctttccaccctccggagcttccacacggaaggtttttacatccggtgtctcctgacggatatctgtgatcacgccaaccttggggatcagcgtatccagtgtataatttttatgacaggtacattcactcattcttttcacctccctgtttttcaaaggccttgatgacttttacgatatttaaagattccggacatttctccacgcagcggccgcagccaacacaggagaacatgccgtcattatttaacggataataaacaagcttatgcataaatctctgacggaatctctgcatctggctggtacggttgtttccgtgagccatcatggtaaaatcagagtacatgcaggaatcccagcagcggtaacggtgaacaccgtgccctgtgtcgtaatccttaatgtcatagcactgacaggtcggacatacgaaggtacaggttccgcaggcaagacaaggcttgtacagtttctcccatacaggagaattgaaacggtccatgtattcttcctgcgcccatccttccagtgaaagatgtgtatatggaagaagctcgataataccacggatcgccttcttctcctcttctacctttgtctcatcagcatctgccaaaagctccttcacagcttctgtcagagcatttcctttttctgtgagaggcttccagaaaagttctccctcgatgatccaggctgcaacatctgcttccggatctgcggcatcaatgccaaatactttacagaagcagctttcctccggttcatgacaggcaagagctacgatagttccatgttctcttcttgcctggtaaaaagtatccaccggatccccaaggaacaccttgtcgagaaccttcacgccctgtacatcacaggctctcattccgaatacgacaaaattctggtctttcagtgcctgaggctcaatgctgatatttttcccatcttttttacaggtatagagattttcactctgcggaaagaaagcatccttcggtgatttcacggttttcagtgtttcaagggaaacttctgcatcctcgctccatgccttgaagttcacctgctcacttacctttaccggtaaatataattcctggtctgcggcaattttccggaataatgccggcagattttctactgcgatcttatacatacattatcccctttctgccacgatccctggctctacatcctcaaaggtaaagctggtaagcggaccctttgactccgcatcctcgcctgcctgatactcaccgtaaaacgcatcaatatccttgataaacttacggttaaacagatgaaggggaattccctgcgggcagactctgctgcactcgccacagtccgtacatcttccggctacatggaaggcacggatcacatggaacatcttttcttcaaaggaatccacatttgccttctgggcgctgtcgaacttattgctgtcaaaaacgcatttgcggcagctgcaggccggacatacattacggcaggcattacagcggatacatttactcagctcgctctgccagaatgcaaatttttcttccggactcattgcctcgatccgctcaacttctgcgaaacggtcagcgtcctttgtctcctttgactcaccgatcagttcatcgtaaattttatgctcttttcctttacatacatggcagcgttccagcatggcatctttgtatgcacaggttttttctccgtaaacagtatccacagtcaatgtctctgcatctccggtaatctctgctccggaaattccccggatacccttgatccccattttgcggatcttttcaatatccagctttcctttacagccaacacctacgatataggctttttctctgtctacacgatgctctttcaaaagctggttaaagctatatgtatcgcagggcttcagacagaccatggtttttccttccagcttggaagcttcgatcatatatttgcttaaattggcaccgcagaatccatcataaacaaaatcctccagagattccggtgtttcaaaataggctggttccggattaaaggcaagatctccggctttccacccaagaacccggactaccgtgccatctgcaagcagttcttttgcacgttttatcagctcctgcatcttatatcctccaatctcacgtttttaccaagtgaatggatcttctcaacaaactcattcatagtctgtgaaaatttcacgccctctgcggcagatacccattccacacgtgttcttccgttttccacaccaatataatccagcattgaaaacagaagtgtcatacgtcttcttgcataatagtttccggtactgtaatgacagtctcccggatggcatccgcacatgatcacaccatcggctcctttttcaaaggcacggaggatgaacatgggattgacacggcaggaacatggaacacggatgatctttacatccgccggatagctcaaacgactgcttccggcaaggtctgctccggcgtaactgcaccagttacagcagaatgccacgatctttggtctgaattcttcctttgtttctatcgacatattgcatccacctccgcgataatctgtctgttggagaagccctgaaggtccatggctcctgacgggcaggctactgtgcaggcaccgcagccctggcaaagtgctgtattgacaaccgcaactcttcttgtctcacggataccgtgatcgttgacctgtttctcctcataggaaatcgctccgtaaggacatacatttgcacaggtagagcatccgttacagagaagctcgtcggattttgccgtacatggattggttgtcagcttgtcctttgcaagaagccctatggcctttacagccgcagctcctgcctgggcaactgtctccgggatatcctttggcccctggcatacaccggaaaggaaaattcctgctgtcggtgattctacaggacgaagctttgcatgggcttctgtaaggaaattgttggtgtcaatacttgcagtaagcatggtagcgatcttacgtacatccggatttggctcaatggctgttgcaagaactaccatatctgctttcttgaagatctgcttattatcaagaagatccgagccctgaacaagaagtgttccatccggctgcggaattacttttcctacctgacctttgatgtagtttacgttatactgctcaactgctcttctgtaaaactcatcgaagtttttaccaggtgtacggacatcaatataaaataccgtcacattggtatccggatatttatcacggatcagcatggcatgcttagctgtgtacatacagcagatcttggaacagtatggctttccgcggtcatccacacaacggcttcccacacactggataaatacgatctctttcggtgcttttccatcggaaaggcgctccagatgtccttttgtaggtcctgccgcattcatgatacgttccagttccagggaagtgatcacatccttgctttggctgtatgcgtattcatcataccggtcaagtttgatggtatcaaatcctgttgccactacgatagctccgtatttctgtgtcacgatctcatcctgctggtcataatcaacggctcctgcctggcatactttggaacagacaccgcatttaccggtcttgaatttcaggcaatgctcccggtcgattaccggaacatttgggattgcctgggcaaacggcgtgtagatggctgtccggttgttcaggcctctgttgaattcgttagggatttttttggacggacatttctcctgacagacaccgcagcctgtacatttgtccatgttgacacttcgcgcttttttgcggatatcaacagtaaaatctcctacaaaacctgcaactttttctacttcactgtatgtatagatattgatcttttcgtgagctgcagcctccaccatttttggagtaaggatacatgcggagcaatccagagtagggaaggttttgtcaagctgtgacattcttccgccgatacttggtgttttttccacaatatcaacttcatagcctgcatcggcaatatcaagagccgtctggattccggcgataccgcctccgatgatcagggctctctttgtaacctggctttctcccggctgaagaggagcatttaaattgacttttgctactgctgctcttgcaaggatcacggccttctccgtagcctcctgcatatccttgtggatccaggaacagtgctcacggatatttgcgatctccaccatatatggattcaggccggccttttccgctgctttacggaaagttgcctcatgcatacgcggagaacaggaacagacaaccactcctgtgagatttttttcacggatggcttcctggatcctggactgtcctgcttcagaacacatatactgataatcttctgcatggacaactcctggctcttttgcaatgatctccacaacttttttcacgtctaccgtagcggcaatattacttccgcaatgacagacaaatacaccgattctctgcactttctcacctcctgtatcttctgaacgcacttacaagcagctgctgaggaagctccggatcaagaagctccggaatttcatttggtgaaagatagtctccgcctttttcccgaacaaccagctgtcttgccccgtcaatgatctttccgggttttacgtctcgcggacagcgctccacacaggcaaaacaggaaagacatttccacagagatgctgaatttacaagtgcttcgatattttcattgatcacgtaggacacaaactgatgaggcttgatatccatctcgtcaaaggatgggcaggtagcagagcatttgccacacttcatacatttcagaggattggtcccgctgatctcctttattttttccgcagcagaatggttatctctcattttgccacctcctctttgacgccaagggcttctgccagaagctctgtaaaatagtaaaccggcattttatttccggaatttttattcagattgtatttgcagagcggacaggcagtgatcagcatatctgcgccaaagcctgctgcgctttcttcaatcttttcacacatattctgtgacatttctttttctttcagggatatatatcctccacagcattcatttctgtaaggatagatcacaggctcagcgccaagggcacggataaaatcctccatgatccttggattttccggatcatcaaatgccatgatctttccaggtctcagaagcagacatccgtaataggctccgatcttctttccggtaaaaggatttactactttttctttcagtttatcaaaaccgactctgtcccggagaacctccagataatggagaacggttgtttctccttcatagggagcttccaactgcatataattgttggctctgatccggatatcttccacatttttcatatcatcattgacacgcttgatcacatgatgacaggctgaacagattgtcaccagatcctggcctttttcttttgcctggtttaacgcacggacggaagaaagctttgtggcgatctcgtctgtgccaagcggataaacaccaccacaacactgccagtcctcgatctcctcaagctcaaacccaagggctgtggcactggctctggcatactcatccagatctttggcctttgttctcagggtgcaacccggataataactgtacttcatacctttcattatcctttcttagtctaaaatctgacgtttctagtagatattcttgttcatatattgtcttttttttaacgatacatgaataaaaaaatgaaatctcaactaacacttatttgagtttttttatcaatttgcacccaaataaaagagaaaaacactcttcctccgcaattaagaagtgtattagctcgatttccgaaatcatcatatcacgttatttctgtttcgacaaggctttttcgatatttttttgtgttttttttaacgtacttttgaaaaaccttatcatttacgatcctgcttccatgataattttcattttcgggcataaaaaaagctccggatctctccgaagcttttttgctcctatcagtaaataatgatcggataacctgcatcaatggtgttatagatcagtgctgcctgatccttaggcagattgatgcagccgtggcttccgttggttttataacggttcccgccaaaggatgattgccaagacgcatcatgaagtccctgtccgtagacaaaaggcatccagtaattaacctttacatcgtaaccatattcattgctggtaaggttaaagggactcgccttgtaggcgatcggccatgcaccacgatatgtttcacgccccttcaccggcttaccgctgacaatatctgtttccgtcacaaggcttccgtccttatacagccacaaatgctgtgcatccagactgacctctatgtaactgcctgccagatcgtctgttccgtttctctggtatccttttttgctgtaaacaggctctcttgttacagcagtaccgcttttcaggtcttccagaagctgagcatattctccgtcctgatcgatccggtatccgtactcatttccctcaatggtcacatccgttcccgtagatgtatgaaaggtgcggggaacataaatggtattgtatttgttggcaagctcactgatgtaggctttaatggcttcttcatctaaagtcagcgtctccccttcagccttcagccaggatgtgatcgtatcggaatccagaacagccgtttcacttccgaatgtataagttactgtactgctgcggtatttcttcagctggctgttcaggtctgtaaccttatttttcatatcctctgttgcagtgacagtcggacttacatacacatgcttgttgatcggtactgtaatgatatccccaagcagagccgtatcaaatgctgcgttcagatttgtgtccacggtagtctccagcttatccggatcgatctccgtcccctgtacctgcttcacaagggtgaattcttttttctccttatcgtactgaatggctgcatcaacagaagcttttctttcttccgtaccgaaatttgaaagatcgagagcctgcttttcctgctcctcatcttcctcgatctgacattccggttctatattttcttcctttggaaaaagcttccggctctcttcccgctgtttctgaatttctgtaagcttactcagaagggcttcttcattgagactgtagcccagctctttcaaagtagtactgtaaacttcctgatcattttcctgaaaggataccggacgatctgcaaattccgcagtgatcttttcttctgcctgctttgcatccagtccggaaacatccactccccatatggaaatcttccgtcccagcgtattgtgatctgccaagtatgtatagacaaataaccctgccactgccaggattgttacgccaatgcagatcccaagtatgatcttcagtgtctttttactgatggttgatcttttctccatacccttatccctcgagtcttatgtaatatatgttatgttgtcacactggctgttattataatacaataaatcccattttctgtaaaaatgacttatcccggatccttctgatccggtaaaaaaagacagactgacgcctctgcgaaaatctgtctttctcatacgtttctttatctgtttctggcagcagtatttctctcaggatcttctgcttcttattccggcattacgatcttgcctgcaacggcacaggctgctgctgttttcggagatgccagatagatctgaaccttggaagttcccatacgtcccaggaaattacgattgttggttgccacaaccttttcaccgtctgtcaggattccgccggtccttccgcagcaaagtccgcagcccggatgtgtaatgatagcccctgcttccgcaagagtatccagaatgccaagctcaatagcctgacggtaaattttgcggctggcaggagtcacaatcagctttacaaagtctgcaacctttttgcccttcagcacctctgctaccgccataagatcctccagacgtccgttggtgcaggaaccgatgaatacctggtcgatggtctcaccctgaagctcactgacatcacggatcttgtccacctgagacggacatgccattaccggcacaaaatcctctgctttataagttatggtcttcatgtagacagcatcctcatctcccacaagactcttctgataatcatcaagctctacgttgcagtaagcagctgtcttctcatccggtgtaaaaagtgcacatttcgcaccggcctcaattgccatattcgccatagtcatacggcttgccacagacatgttttcaatggtgcttccggaaaattccagagcacggtaagtagctccatctgcacgaaggtcaccgatcaggcggaggatgatatccttggacatgacattctccggaagttctccgtcgatcacaacctttatggtttccggaaccttgatccacatggttcccgttcccaagatgctggccatctctgtgtaaccgatgccggaagaaaacgcaccgacacatccataagtcgtggtatggctgtctgtgccaaatacaatattaccgggtttaacataacctgcctcagtcataagctgatgacagataccgtcacttctgtgtacgtttttcatgccatatttagctgcaaaagcatctcccacatggaaatgtctggtatcatcctgctgacttgccggtacaagatggtcatagatcagaacaaccttgtccggatcccacagcttctgaaagcccatctcctcaaatttttccgctacaaacggaataaagatatcatggatcatcactctgtccacattgaccgtcacgatatcaccaggttttactgccttgcctgtattatgtctgataattttttcaatgatcgtctcgcccattatttctctcctctccgttttttagtccaggccgttcagcttacgcatggcttttaccagtccgccagcctggatgatatccatcagattctccggaagagaagcgatcgggtactgttttccattgtgctctacatgctcattcattactaccgtaacctgatctccctcttttacattgtcatgaagatccggctgctcaataagaagaaggccgttgttaatggagttgcggaaaaagatccgggcaaaagatttcgcaatgacacactgcacacccagtgccttgatgatctccggtgcctgctctctggaggatccgcatccgaagttctttcctgctacaataatgtcgcccttttggatctgtccggccagctccggacgaagggggctgaatccgtactgtttcatatcgtcaatggttttcagtgcaaggtactccgtcgggataatgatatccgtatcaatatcatcaccaagtacccacacttttcctgtaaatgcttccatatgtatatctcctgtttattccgttccgtatcatcaggcaaatcttttctgtctgctctgttataagaacccacgccgaaacggatcatcctctgataatttctgaatatattatttaaatcttttctgaaactcttatactctgtcagcagttgcgatctcacctgcaacggcagatgcagtaactgttgccgcagatcccaggtaaaccttggagctcggatgccctgcacgtcccttgaaattacgggttcctgtgctgatcagaacctcattctcgccgataacaccctggcagcttccccagcatacactgcagttcgggttcataacaatagcccctgcttccatgaagatatcgataagcccctcctttaatgcctgacgatagatggtctggcttgcaggaacaaccaggaaacgaattccctctgcaacttttttgcctttgatcacctctgcgcctacacggagatcttcaatacggccgttattgcaggagccaaggaacgcttcgttgatcttgatgccacaggtttccttagccggaaccacattgtcaacaaagtctggcttcgctacaaccggacggacttttgaaagatcaaaggtatactctcttgcgtaaacggcatccggatcgctgtgatataccgcttttggctcacgtccatgctctttcagatattccagagctttatcatcagcctcaaagattcctgtcttcgcaccagcctcaacagccatgttgcaaagtgccatacggtcgctgatgcttaatgttctggcgccctcaccggtaaactccattgcctgatagttgcagccgtttgccccgatctcgccgataatggtaaggatcagatctcttgcgtaaacgccctcaggaagcttccctgtcaggttaaattttacggtttccggaaccatgacccaggaagttccggttaccattccgtaaaggaaatctgtacatcctacaccggtaccgaaagcaccaagtgctccgtaggaacaggtatggctgtcagcaccaaagatcagctgtcccggacggacataattctcgatcatgatctgatgacacacgccttttccttcccagaaatcaatgttgttttctcttgcaaaatctctcatttttttctgggatgctgctgttttcgggctgtcagacggtacattgtggtctacgataaataccagtttctttgtatctgcgatatgtggattttttaatttgttattgtacatgtcaacagtcagatgtgtggttccgtcattgctcatcagatgatccagctggaccgtatagatatctccaggttttacgctgtccacaccggctgctgccgcgatgattttttctgcgatcgtcattcccatctcttattcctcctcacggttcagagaagcgataagtcctccctgattcagtatattctgcatgtattccggcagttttgtgcaggaataagtctttccgttggcaaccgctgttccctcggacatatgaagctccatggtatctccggtcttcacatcatccgggaggtccttacagacaattgccggaagtccgatattgatggcattgcggaagaaaatacgggcaaaagatttcgcaatgactgcctttactccaagtgccttaagaacgcccggtgcctgttctctggaagatccgcatccgaagttctctcctcccactacaaaatctcccggtttcaccttcttggaaaaatccggatccagtgactcaaatgtgtgactcttcatctcatccagattcggcagaagcaggtactgggatgcaatgatctgatcggtatcgaggtcattatgaaatttaaaaattgttcccttatccataaaacaagttcctttctgattgttatccatttccgggttaacattcctctgttacccttttcgtcctatattctaacacaaaacgtcatataattaaaatgtatatttttaatacttaatataacttcaagttataaagtcattttcctgtgatcagcgcaaaatatccccactcccacagaagttcttcaaaactgttctcaagatattcccggatatcttcttcctcatatccggtcattctggagatcaccaccatataatcccggagtgtttcgtagggaagtgctccccgtccctctttctgccaccggagaaaaacagcctggcgaatggtggcatattccataccgatccactgcatatgaaccagggcatcttccagatctccttctgatgtcagaagatccgaatatacttcgttggtaagaaagcttcggagaagattttcatatgcacgaagttcccggtaaaaatcctcccaggcttccgtcatttcctcttcctcatactcttccgataattcctccgccaactccgtcaccggctccagatacttccggtaaagtccttctttccagtaatttacagccagatcctgcaaaagttcattgcattcgtccatagtatccagaacaggcaggtctatctcgctgatagctctttccagctggtgaattgtcttctctgaaaaataatcttccacaagctctgtggtaagcggcgtgttccggtgaagttccttcagaacataaaaactttcaagaagggtttcctccggtgttttttcaggatccattataagatccataaccttccggcgcacaagaaaaagcggctgttccttttcttttggagtttccggaaaagcgattcttttcttctccttccagatgtccaggacagccgggcaacagggcatcatggtcgcttccttatgatcctgaaattcatggatctcccttggaaaaatctggcaggtctctgaaagcatcgaatccccataagcacttaccagatagcacagtctgttctttgccaggaaaggacagtcgtgctcttccgtcatcttcatgatccggctgccgtcctttttcatggtataggcctgcaggcagcttctgtgtccgggcacctctgacggcggctggatggttttccagtttctgtaggtttcatcatctatgttgatcttccattccctgcagcagctgatggtgcatttgtctgcaatacaggtaaattcgtcgtaataatcaggttttaataattccatgtttcctccatattctttatttttcagctctaatgtctcctgtttgcaaaatggacatgagctgacatgttttatttttccccataaacacagaaaagcggaattctatccgctttctctgatattctgtgtattcgtttttattctgcattctctcccaaaagttgtctgtgcaccttccgccttacaaaccagaaacaggtcacctgcatgatgatcgtaatgatccaggatgccggataggaaataaacagtaatttcaatgatctgtgaaccgggaagattccgaagatccacacaattcgaaggccgaccgttccgataatagacaggatcatcggcacaccggagcgtcccattccacgcagtgctcccggaaacagatccatctgtccgcagaggaaataagtaactgtggtataggcaaggatctccattccgcactggataacctccggatcttccgtatagattttcagaagctgcgggccaaagaaatatgctccacatcccatggcaaaggacaccacaaaggacaggatcagacaatccaccagcacccggtccatacgtttcggtttccgaacaccgtaattctggctggtaaaactcatacatgcctgggtaaccgaattcacggacacatacagaaatccaaaaatattattggctgctgtatatcctgccatagcaatggaaccaaaggagtttacagaagactgaagaagtacattggaaaaattgatcactgtactctgaatcccggcaggcagtcccacctggaagatctgcttcaggtactctccctttatggacagttttgaaaaacgcagctgatagcttccctctgtctgatacagacaccgaaggacaagaatgcaggagatcagctgagagatcaccgttccgattcccacaccggccacgcttaaatgacacacgatcacgaaaaacagattcaaaagcgcattggcacagccggaaatgatcagaaagaccagcggccgcttggtatctcccactgcacgcagaattgctgcgccatagttatacagcataaaaaacggcattcccagaaaatagatacgcatataaagagcggaaagatcgatcacatcctccggcgtatccatcagctccaggcagattctggcaaagatcactcccagaaatgccatgatgattccgctgatcagagccagcaggatcgatgtatgtactgtttctgacatttcttcatccttaccggaagcataaaatctggctgccagcacattggcaccaagagagattccgataaaaaggttggtaaacacattgatcagtgcggtagtggagcctactgccgccagtgcctcacttccgctgaaacgtcccactaccacgatatccactgcattgaacatcagctgcaggataccggacagcatcagcggcagtgaaaacgaaatcagcttgtccatgatcgacccattacacatatcgatctcatacttgttttttttcacgatttcatcccccatgttcatacttacataagaatattatagcacctttcgtcggaaagctacaatgaaatatttttatggagaatatgcagcggctgcataaaatacgcagccgcacagtaacgtgtgtttatcatttcactatctttccaggagtcctgcatcacgaaggtttgcaagaagtgcattaaaatcctccacaatatcatctaccgttgttgcatttccaacagcagctgccggggttactgttccggcaggaccggtggctccggctgctcctgctggaccagtggctcctgttgggccgattgctcccgctgggccagtggctccgattgcaccagccggacctgttgctcccaccggaccggtggctcccgttgttccagccggaccgatgactcccgccggacccgtggctcctgttgctcctgttgcccctgttgctcctgccggacccattactcctgccggaccggtggctcccgtcggacccattgctcccgctggacccgtggctcccgttgctcccgtcggacctgttactcctgccggaccggtggctcctgttgctcccgtcggaccgatgactccggctggacctgttgctcctgccggacccgtggctcccgtatatccctgtattcccggttccccctgcggcccctgcgggcccatagggccagggactcccggacagcctctggggccggttggtcctgtaggtcccacagggcctgggcagcctcttgttccacatctgtcacatccacaggaactatgatttccataacaggacatacaggacaaatcctcatgactgtcctgctgcatttccatttccttacgttttcgatgcctgaacagcattcttcgatcacctcataggaaaataactttccctacagtatatgacaacagcttttacctgtgcataggatccccgcaagcctgtaccctgccaggaaaatataataaatatgtctttctttttatgccagaccatatttttcccggaaatatttctggtcatacaatactcccgaatcttccggcttcagctccattgctttcttatgaaaaaagaatgcctgctccgggcatcccattttatcataacaaacgcaaagctgcatatatggcacaaacccatgatactcagccataaaaaatccaccctttttcttatctgaaggcacagtaagcgcctgcccgtaccagtaggcagcctgtctgggcagctctctttccagaaagatcttaccgacctcacagcagatttccgccctcggcacatccatagtcagactgtacaaaaaagcttccagtgcggactttttctctcccattttccggtagcactgtccaagtacaaaacaggcatcgatcttattttccagccatccggacggatttttcaggaactccaccaacacagcctctgcctccggatatcgctgatgataatacagttctctcccataataaagctgatgtctgggttccagcttttctcctcctgccagcattttttcataaatgcggagattacggtccggatcaccttttccacatttccggtgccagatcaccacatctgaataaatgatatttccctccggaatcacagtttcatgaactgccccattccatctgaaatttctggatgttttcattatccgctcccgaaaataagaaaatgttgttctcccgctctggtcaaaccctgccgcatattccatcattacaacatctgttccgggatccagagtttctttaagactcttcagtttttccagattttcttcatccaggacatcatccgcatccagccacatccagtaatcggtgcggactttttccagaagaaaattacgcggagcagaaaaatcatcacaccagggaaaatcaaacacctgcgacgtatactgctccgcgatctcttttgttctgtctgaagaaccggtatctgcaatcaggatcgcatccatcatctgagaaaccggcttcaagatcctctcaagaactgcttcttcattttttacgatcatacatagactgagggaaatcatatttcaggatccttcggatttttataatatttatgccgttcccgtcagtcctatgccttctgtcagtgtacagcttctactttcggataaagctgaactcatcctcatatcaccaactgtggtatatcctctatatgttctgcaagacgatctgctccgttcagctccccgctctcaccatatccatacagacatcctataaatgggcttttgcaggctctggcacattccagatcctgcctcctgtctccgaccaccagataagggcctgtatattcccggatgatttcctgcacaatttctgtctttggacggaatccatacgattcgcagtcataaaaatgatcgaaccatcgttccatcccaaattccttccagtgcgcctcacgataagaagctttacagttacttaagatcacaagatgatatccccggttcttcaaggctgtaagcatctcctctgctcccgggtaccacactgccttatgcttcctgatctgtctgaccatcagttctcctaccatcctgctcgcctgctctttatagctctgatccagctccggcaaaaatgtattccacatctccttactgttaaatcccagccagccggcaatttccgccgagcctatctcccgttcttctgcagccttctgttctgtcagccactgataggtttcgcgaaatgccggttcatagattccaagggtatgatggatcgttccatcataatcgaatatgatcgtttttgtcatcatttattttcctgtcttttagagttgcttcatcagattaaccatctcgatcgcagataacgcacagtcatagcctttattacctgctttgcttcctgcacgcgcaatagcctgctcgatattctcagtcgtgatcactccgaataagaccgggatccctgttgcaagttcaacctgtgcgatccccttggcagattcattgcacaccagatcataatgtgaagtatctccacgaatgacagctcccacgcagataactgcatcatattttccggactgtgccattttctgtgctgtaagcggaatctcaaatgctcccggcacccatgctgcagtaatattctcttcttctactccatgtcttaccagtccgtcgactgcccctcccaataatttattcacaatgatctcattgaatctcgctgcaacgataccaactttcattccctccggtgctactacttttccttctactaaattgatctgtctcattttttcttcctcctgctatttgctgttttttataaatttatttccttaaaaatatgacccatcttttcctgcttcgttttcatatacttccggtcatatttttgtaccggaatctccaaaggtactctctcattgatcttcagcccgaattcaccaagcccatagactttatccgggttattggtcagtaatcttaatgatttcacaccaaggtctgacagtatctgtgccccaacccagtactctctaagatccggtgcaaaccctaacttcacattagcctccacagtatcgtatccctgttcctgaagcgcataggctttgatcttattgatcagtccgatccctctgccttcctgtctcatatacagaatgatccctctgccttccgcctctacctggcgcatcgctgtctgcagctgcaggccgcagtcacatctgagcgatccgaatgcatctcctgtcaggcactccgaatgtacacggcaaagcacatcctctccatctcctagatcaccttttaccagtgccagatgatgctctcctgtaatgtcattgatatagccatacattttaaaatcaccgtactgcgttgggaggtttgcagctgcttcctcctttacatgcttttcatgtattcttatataatcctgcagatcacggatcgtaataaatgtaaggttatgctcttttgccatttcccatagctgtgatgtacgcatcatagtgccatcttctttcataacttcacagcacacgccgcattctttcagtccggcaagtctcataagatctgttgttgcctccgtatgaccatttcgtaccagaaccccgccttttctggaaataagcggaaatacatgtcccggtcttctgaaatcctccggttttgactgatcatccacacacttcataatggtataggagcgttctgccgcagagataccggtggttgtatctgcgtgatccactgccacggtaaatgctgtactgtgattgtccgtgttctcagcaaccatcggcggaaaattcaatctcgccgcaatttctgcactcatcggtgtacagataagaccctttgcataagtcgccatgaaattaatattttcccgggtcgcaaactctgccgcacatatcagatctccctcattttctctgtccggatcatctgtgaccagaattatttttccttccttaagatccctaagtgcctcttcaattgtgttgtactgataattttgtgacatactgtatatcctcctgttctaaaagccgaattcttcaagaaactccatcgtaattccggattcttttttctcttcttcattttttctgatgccaagcagtttttctacatattttccgatcacatcattttccagattaaccagatcccccggcaccttttccaaaagggtggtttcttctcctgtatgtggaatgaccgacacctgaaaaccagcttcatcaacccttgcaactgtcaggctgattccatcaatacaaacggatcctttttccacgatcagatgcaagatctgtggcgatgtctcaattgatacccagatggcattttcttcccggagcatggaacgtatcactccagttccatcaatatgaccgcttactatgtgtcccccgaacctgccatctgcagccattgcacgttccaggtttacctggcttccagctttacaactgccaagactgcttcttctgatcgtctctgccatcacatcggcagtaaatccgtccggctggatcgacgtaactgtcagacacacaccattcacagcaatactgtcaccgatccttgtcccttccaggactttccgggctttcactgccaggatccctgattctcctgtcagctgtatataacggacttttcctttctcttctacgattcctgtaaacatgattcctcctgttttttctcacacacctgacatcttatccggatgtcctcaccgatctggcagatatctgtatatttcagttctactgcttcagacgggaattcaactccgataccttctaccggtgtcttcccggccacaccaccaaacagctttggtgccacaaaagcctgtacttcctttacaattccggctcgcagggcactgtcatttaacgtaccgcctccctccaggaggatgctgtcaatacccctgtttccaagatctgtcatcagcttcttaaggtctatctgatccttttcatccggacagtaaatggtctcaactcccatggtatgtaatatttttattttttcttctgtatttttctgatctgcataagccacgatcgtccggtacttttccgcactttttacgatctgactgtccggcgggatcctgagcttactgtcgcacacaatcctgacaggacttttccagccttctacccggacgtttaacatcggatcatctgcaagcacagttccaatacctgccatgatccccatgtactgatgccgcatatgctgtacttcttttcttgccgcttctccggtgatccattttgatgctcctgtcttcgttgcgatcttcccatccagtgtcatggcatacttcatcaccacgtatggggttttcgtagtaatataatggaaaaacaccggattcagctgatcacattcttctctcataaaatcttcaactactgttacaccggcttcccttaacatctgtacaccttttcctgccactttcggattcggatctcgggaaccgatcaccacttttctgatcttctgttcaatgatcgtttccgtacatggaggtgtttttccatgatgacagcaaggctccagtgtaacataaatcaccgcaccttctgctggttctgtaagagaagcaatagcattacgttctgcgtgaagttctccatactttttatgatagccttccccgatgatccttccgtcttttacgatcactgcccctaccatcggattgggattcgtccagccttctccttttttggccagctgaatcgcccgaagcatatattcctgatccgtcatttctattccttctttcttattcctgttctttgtctggtacgctaaggcttttagacctgtgcaatcggattcacagacaagtgagtggtatatttatttcaaaaacgatgtgccaaatacaaaaaaagcctgcagaaatatctgcagggtggaattgatctgttacatatgatcaataaatgaatgtctgattatttcctacataaaaagctctgaaatggatcaccatctcagagctctgatactacattcattcatacaaaaatcaactgtactatcatcttcttccatccagactatactgtcggccccggaatctcaccggatcatacctttcggctcgcgggctctaccgccggtagggaatcacaccctgccctgaagatatctttttgtttattttaatactttatctgttatttgtaaagcggaatttttattttactcattccatgcggaatattatcagtgaacggtaacgaaactaatcactaatccgcatactatactcatctttttttgtatataaccaattcaggattttcaccgtctttctcatatgtacatatcataataaaatccatatttgccagaataccgaagtatctgtcccctccgaattcagattccatttgatttcccagataagttttctggtcatccagaaatttcactttttgtccatttggcagtgcatattccagatttacatatttacctacaagtgcattcagtctgtctacccttggaagtccatctatatgtaaatcatttatttcatttatcaattgctttttaaactcttcaaactgcccattgtcactaagttcctcataccttttccagtaatctaactttggaagcatttctttcagataagtgcgtgcctgttcttcggtaaagctttcatttaccatattctttacacaaacatcaatcaattcatccatatcattatatgtgtatgttccatctgcatagcaccacttacaatactcctcatttaatgtgccatccttatcacgtcccaatatggaatcatcatcaattggcatcccgcagcactggcagatcagctttctcggttctcccaaaagcgtattgatcgagacatcaaattctttcgataagagcttaagtgtatcagtattcggaacggtatctccattttcccagcgtgatacagcctgtctcgttaccatgattttatctgccagctcgtcctgtgacattcctctttccgttctaagttttaagattacattttttgtttccatagccgtcacctccattatcctattataaagatagatccatgttctgaaaagcaacttcctgttactatagtctatccatattttataatgtagtatatgaagtggataatataagaaaaacccttgaaaatactggattttcaagggttttatggatcttattaaagatctgcagatatcagattatttacccatctgctttgcaacttcctcagcgaagttctcttctttcttctcaagaccatcgcctgtctcgtagcgaacgaagcctttgatctggatcttagcgccgttctcttttgctacctgctctacgtatttagcaacggactgttttccgtcctctgcttttacgtatgtctggtcaagaaggcagatctctttgagctctttcttgatacgtcctgtgatcattccctcgataaccttagccggtttctgggactccttcggatcgttctggatctgagccataaggatctctttctcatgctcgatatagtcagcgcttacttccttgtcgcttgtgtactgcggtttcagagctgcgatctgcatagctacgttcttagccatctctttaacagcatcgttaacaacatctgtctcaacgtctacaagaacgccgatctttccacccatatgagtgtaggaagcgatgaatccgttctgctcctcaacctgagcaaatctacggatgttcatgttctcgccgattactgcgatctgagctgcaagagcctcttttacagtcttagttgtatcaagtgcccatgcctcagcaaggaaagcatcgatatcagctgctgttgtgttaagtgcctgtgctgcaacatctgcaacatagctctggaatttctcgttctttgcaacgaagtctgtctcagcattaacctcaacaacgactgctttctttccatcctctgttaccagagttttgcaaagaccctctgctgcgatacggcttgctttcttctgtgctgtagcaagacccttctcacgcaggaactcaactgctttatccatatcgccttctgtagctgtaagagctttcttacaatccatcattccggcgccggtcatctctcttaactcttttacctgtgctgctgtaatagccattgttcgtttcctcctgaaatattctgtttatacgaattattcctctgtagctgcaaactcctcagactcagcctcgatctcgccatctgcctcagcagttccctgcttagcctcgataacagcgtcagccatcttggaaacgatgagttttactgcacggatagcatcgtcatttcccgggatcacatagtcaagctcttccggatcacagttagtatcgcagataccgataagcgggattccaagtgtatgagcctcctgtacgcagattctctctttcttaggatctacgataaagatagcatccgggattctcttcatctctttgattccgccaaggttcttctgaagcttaacaagctctttgcgaagctcgataacttctttcttaggaagtacgtcgaatgttccgtcagcttccattgtctcgatctctttcagtcttgcgatacggctctggattgtcttgaagtttgtaagcataccaccaagccatctctcatttacgaagaactctccacaacgctctgcctctgtacggatagcatcctgagcctgtttcttagttcctacgaaaaggatgtgtccaccgttggcaacgatatctgctactgcattgtaagcatcgtcaaccattcctacagactgctgaagatcgatgatatagataccatttctctctgtgtagatgtacggagccattttagggttccatcttcttgtctgatgtccgaaatgaacacctgcctctaaaagctgcttcattgaaataacgctcatgtcttttctcctttttggttaaattcttccgcacaggtcgccttctctctggacccatcctcacaccgtagggcaccatccttatagaatcgccgtgcgtgcttatttttgcaacttctgaattatagcatagaaaatccccttatgtaaaggggatttttccaatttttttctgtttttcagcggtttccggcagacttcagaagctccagctctttttcggtgagtgaacgatattttcctgtcggaagatctgaaggaagctccagcggccccatggatagtctttccaaataagttactttttttcccagtgcctccatcatccgttttacctgatggaattttccctcgtggatggtaagtcggatctcagattcccagttcttaccggcttctgcagattctgtaccggactcccaggtagaaaggatctccagccttgccggtcgtgtgagatctttttccccgatatccacgccttctgccagcttcacgacatcttcttctgtcactttcccggatacttttgcatagtaggtcttatccacatgctttttcggagaaagaagctcgtgtgccagaggaccgtcatctgtgatcagaagaaagccttctgtatctttatccaggcgtcccaccggaaaaagaccctttcttctgtctttctcttcaatgtagtcaagaaccgttttatctctgaagtcctccgttgcgctgacacagcctgccggcttgttaaaaagatagtatacatattccggtgcagcatggatctcctgcccgttcataaccacctgatcttcttctgttactttcagctccggtttcttcacagatttcccgttaacctgcacctgacccttctgtatgtatttttttacctcgcttcttgtacctgcgccggcatctgccagaaatttatccagccggactggtttttccattaatcatttacctcccattctgttacatgggctgcctttgcatctgctttgatgaaatccgggatctctccggtaaatgtcatataaagtccggaatccccgccggtgctctcctgtccttccagaaccacttccattgtggcatctgcattccagatagtccatccgtttaccagctgtgatggacggatacattttttcagagcttccagctgttcctttttatcgtaacggactttataaccgttctctgtttcttcaagatccgaaatgggctcagtgtcggaaaaaacctcatcatcttcgccggcagcttcggagctgaagtaataaacatcaatatactcaacagacagctcatccatagaaagaggatatcctgtttcttccaaaattgcaagtgttctcttatatgacggatacaccagaacggaggtagacacattctctccttcctgcacagccggtacattcattccccattcatccatgtagccttctgacggaattcccgtataatcgaacatcagcattgcacatggctggtcttttactgtctgaccgccgttttccagaatgtcctttctcagtgcctctgccagtgcctgacgcttctctgcatttttttcaaataaggtttgaatatctccgtcacagaaaataccggtgacctctttcagatactgtttgtccagctgaaaaaatgaatatctgtcttctttccatgtctgctcatcatacagggcttccataagattctgtgcctgtgcagaggatacaatatagcctctgcatacactgaatccctgtttatttatgtagcgcacatacatgcgccttcctgatttttttcctttttcattctgaagcctgatatccttcagactgttatataatgctttacttttcatcaccggctgatccagcagaccggaactattgtctgaggtggcagtataccggatcttatagattccgttttcttttttttccacattgcaaagctgctctgtatatgaaagattgcttacatttatcacaactccctgaagattgtcataagccggaaaataactgtcatatcccagaagatccattttcatggtcagcgcacagattgccacaacacctccaaggatcataagctgcacttttctgcggaaaaatctgcgaaaatccatttcatagatcacttccagaattccatggaccaggatcgttcccagtatcattccgaagatccaccatgctgttttggatgaatcttccggaatcatataaaagatcagaccgatccccagtccgaatggtattgtgatcagggcacttaagaccggctccatccaggtatataccagagcttttccggtattctctgaccttcgtctgcaaaatgccatccaggaaagtgctgccatgataaacagcgtgaggatcagtatcagcaaatgctttccaaagcttccgctgctgtatctatctataaagcttacgatcaccataagaggagatcccagattccgcactgctgccagaattccgtaactgccctcgtaccaggtatcaaaaaataaatgtccgcttaactgcagcatcactgccagaacgatactgtaggtaaacagccctgcccatgcaagtgctcccatcaacatggtaccggtgcaggcgatcaccagcactgtggaaaaatacaccagaagatacatcaggagatggagcaccagcaggatcagtgcctttttcataatggaaaggctgtaatatcctctggctgccccgatgcataccgcagcaaattccatgatcacatatggcaccagataataaagaacagccaacaatactctgtgcagaaacagtgcacttcgctttaccggaaggctgtgatagaaatccacttttctcggggaatacagataccagaagccgcttactgctgcaaaaaatgcggttaccgcagccacagctgctcccattgtgagaaagtcactgctccacaggctggaatacagataggaaagctgactctgagtataactgcgctcattccattttcccatcagaataagttccgctaccggaaatgcaaggagaaatgcgatcatggcaaatgccgggatccatctttgtcctttggaagaggatttcatatactcactggaataaatttttgacttcatagcctgccacctccgtttcgctgataaatatttcttccagagtcagtgggagcacttcgcagaaaagaggattttttgcctgtatcttctccatgatttctcttcttgttcccctcgcagtaataagcagcagggagccctgatgctctgttttcaaaacctccagctctttctttaattcttcttctttctttttgtcagtaagtacacactggatcttatggatgtggaatttcatatcctccagatctctggaaaggagaattcctccctgatgaagaagcccgatgtgatcgcagatatcttccagctcacggagattgtgggaagcgatcaccggcgtaaattcacgactcatgatctccgatgcaaaaatactttttactgcctggcgcattaccgggtccaggccatcaaaggtttcatcacaaaacagatatttcgttcctgtactgattcccaggatcaccagaagctgtttcttcattcccttggaaaaagtgctgatttttcgttttccatccagatgaaactgcttcatcattgtctcaaaacgtgcctgctgaaatcccggataaatacaacggtaaaattctgccatgtccagagcattgtaatttgccggaatatatgcatcgtccggtatgtagaaaaaatgctctttgatcctttcattttcaaaaaccggttcttcatccatcagcacctctcctctgtcctgacggatgatcccggccatgatacggagcagagtactttttcccgcaccgttggagccgatcagtccaaaaacctcccgttccccgatatccatggtgaccttatttactgcctgtatcttaccaaaagctttgctgcagttttttatctcaatcattgtttccctccttatagcataagcggatcacaccgatcatttcttcctcccctactcccagagccattcccttttctgtgatctttttcagctcacttaaggtttcttccataccgatctgcctgatcctgctgctgtctgtgacaaaactgccttttcccttcaccggacagatcagcccctgctgctccagttccatatatgcccgctggatggtattgggattgatggataattccacggccaactgccgcacagacggcatcttggaagatggctccacagctcctgacaggatcagcatccggaatttctctacgatctgctcgtaaatgggacgtctgtcctgatagtccaagaataacatacgacgctcctttctctgtaatctgtgtgttaagtgtattaattcttttaatacacttatgatagcacgtgatacaaatgtacgcaagaaatggtctcttaaataaatataaaatctatataaatttaccggcagcaaaagattccggcatatttttacaaaaaaatctgtaatggcatccttatactatgatcccattacagattctctgtaaagcaaatatttatctatcactctgcctgatccagtagcaggcgaaccttcgtgatccacattggatcagacagcccggtagccacgtttttctccccggcgtgcaaaatactgatatcctccgatcatcgctgccgcaaaaacaccatagatcatcagaaggcttcctgctccggctttttccaccagagtctgggcgtattcactgaaaataagtatccaggtattggctccgatgtgcatcagcacgctggtccacttattaccgcccatctccagaaaccacgcagaaatccctcccagaacaaacgcatacacagcctgcaggacatttccgtgataaattccgaaaaacgccgcagagatcacagcggaaaccagcactgaaaagtgatcccgaagtcgcagatagatcagccagcgaaagatcatttcttctgcaacgggcgctatgatccccatccaaaagatcatcataaacaaactctttcctgaggtgatcttcgtcatcgtctctccatagctggatgagatccagttctgcagaatcgccaccagcacattggcatactgggcaaatccggctccagcagcaagaagaagcagcatttcaggaatagatagcctttgttcctcaacggaagtcaaaccgccgatcagccttcctatacgatccttccggtaaaaatatactgccggaaacataaccagcactccggtaagtccggtgatcaccagcgtataactatagtacctttcctgtgcgttgccgacatgccctgccagccagagaagcacggcgcttccgaggatctgtccgataagataatggattcctgccggataaagctccctccacactatttgaaaaatattctgtctatgcagaggggtcagacgaaaaaattcagaagttcatctgcggaagctacgatctgaagaggctgtgccttttccagttcttctctgcttccatatccgtaagatacagccacacactggatcccgcatcgtctggctccaagaatgtcatgttctctgtcacccaccatgatcacctggtcacggtgatcagaaagactcattctttccagagcttcctcgatcacctgagatttggttactttcggtccattgaggtccgtcccggcgatcacctcaaaataccggctcagattaaaatggtccatgatctgtgttacgtaaaaggtcggtttcgcagacgccacagccagtctgtagccacgacgtttcagttctgccagagtgttttccacgccgggataaacggtgttctcatacattcctttttctgaataccgttctctgtaatattcgattcccttctgcgctgtctctttatcaaatcccgcatatttcataaactgttccagaagcggcggacccacaaaaaccttcaatggctccagctccggtgccgaaactccaagcttctccagtgcatactgtacagatttcgtaatcccctctccggattctgtcagtgttccgtccagatcaaaaaagattgccttatacataaattcctcctgttgtataaaataatcagtaagtatgcctattgtatcactgtttttctggtaagtccatggtttcatagtacagcttcccggatttcacaaaacccatgagctctgctttccagggatttctgctttttttcggtaattccgccagaagcttttttccctgccagtaaaaatcacattcttttccattgatccgaaatgaaaggatctggaacggaatatccggactgatctctatccggatcctgttaccgtctgttttcattcggatcaccggtttttgctctttttcttttttcctatccgacgttcctgttggttctgtccgatagtaagataatgccggattttgcttcttctccctctttgatgcatctgtcactgactttcgaactggtttttgagtcaacgttacagatggacttgctgtcactgtctgtatggggatcggttgttcagtcagtattggcagttttgttggtatcggcgtttccgtcagtttttccgcaggtatatcagctatctctgcttctgccgcagtatttccattttccataaagctttcttcctgagaacgtacctcatctgtctgaaaatctaaattccattgtgcagactcctcctgatcattctctgattctgcccaggcagcagaatactcctcagtatttccttcttctctgttccaattactatcatcacttccttctcctgcatagctttcttcccagtcttccggcagctgtccggttccttctcccacattcatatcaaatccaccggtatcaaaactatccattcctgacacatcaactccatagacagcaatggaagggatcatccagctgcataagaccagcagaaacaaaacaataaaacaggttttcctactaggaattttcatttcttttggttttttctgatcactttctcttctttttctcattgatctcctcccaaagctgcagatttctgctttcactgtcatccagtaattccgctttttctttctctttataatcttcccacagctttctgctggcctctttctgaccggtccgaataagaaacatcccatattccccgtaggccacaggatattcctcatcatacagaagaagattttcataatataaagccgctttttccggttcacacaaaagctccgcattccatgccagcaatagctcaatacgacgctgctgttctttttccccataatttctacttaacctctggagtctcttttccgctgccatacagcacttttcccgatcttttgagtcttccggatactgtctggcttcgtaatacaaatctgttacttctgagatcgccacagaaaattcttccgttttcagcaatcctgctatcaagatcagtgttcctatcagaatccctgcagctgccgcttccagaaatcgttttctccaggtgatcatccgatatctgttttccagcttttggattttcttctgaaccactgacatatccgaatatctgtatttttcctgttttctggtacatcggaacagaagccagaaaaaatccggatataaaatccactgccatttcttttttccgtaaagcttttccagggtcttccccagagcataaatatcacttcccggtcttaagtagccctgatactgctccggcgcggcatagcctttcgttccttcacagatctgttttctttttccatgatcgaacatggcacttccaagatctatcagatacagatgcccggtttctgaaaacataagattatccggtttcaggtccccgaaacagaccgatggcttccgactgtgaagatattccaatactctggcaatctcctttcccagagcaaggatttcccgtaaagaaaaccgttttcctgaacggagaagttctcccagcgactgacccttgatatattccatgatcagataacagtactcccctgtttccacataatcgataatcttcggtattgcaggatattccagatgctgcatgagtctggcttcttttttctttgcgatcggtatctctttcactgcacggcagataccaagctccatatcttttgccagataaaggcttccacctccgccatgtccaatttgttctacaatgcaataacgttctttcagaacatttccgatcagacagatcaccttcctctcatttctgtcagacaatatttataattacgtttcttattgatttgggataatccggtgaattccggtttgaaaaaaatcagataacttatagtcagacagaaattcgtgatctgccctcgtttaggataagtcctattatagcacgtcctgttctttttgcaaagaactttctatataaaaaagtacgccggatatagcagacaaaaaatgtccctttatccggcgggccgtcatcattcatagtgtttgtatctgtaaaactataccttacatacgatccggtgcagagaatccaagaagatcgatgcttgtctcaagcactcttcttgtaagctggagcagctgaaggaaggattccttctgtgcctgattctcttcacttaagatcttggtctcatggtaaaagctgttaaatgcattggatacctcatagatatatgcacagatcttatgtggtgctttttcttcaaaagcgttctcaaccattgccgcaaagccggaaagttgaagcatcaggttcttctcactggcattgactgccggaaggatcttacctgtacttaaatctcctccctcctgtacataacggttcaggatcgacttaatacgaacgatagtataaagaatatacggacctgtatttccctcaaaggatgtaaagcggtcaacatcaaagatgtaatccttggtcgcctggttggaaagatctccgtatttgattgcggaaagtcctacaatcttggcagtatcctttgcatctttatcttttacactgcgattctccacgatcttacgatacatttcctcatcaatatctgcgatcaggttctccagacgcataacaccgccttctcttgtcttaaacggtttaccgtcttttccattcatggtaccgaaaccaaggaaggaaagcttggtctccggatttacaagaccggtttttcttgcgcagcggaatacctggataaaatgcagctcctgacgcttgtcaacaacataaaggatctcatccggctgaaagagtttcatacgctctacgatagtagcaaggtctgtggttgtatagagagaagctccgtctgatttcagaagcatacatggaggaatctccttggtatcactctcttcttttacatctacaacaagagcgccctgatcctcataggcaaatcctcgcttcttcatatcctctaccatatccggaatgtatggctgtgcatcggattcttttttccagaggtcaaaatctacgttcagattcgcatagtttctcttaaggtctgttacagatacattcataatgtgattccagagagccatgtatccgggttttccctgctgaagaagatgggttgcctccagtgcctcattacggtaagcctcatcctctttggacttcccactggcacatggatagatctcttccagctcgctgatagtaaacggtgcctctgccggatattcaccggtaaagctgtcatcaaaatataccagctccggtttccggtgtttcagctcggtgatgatcagtcccatctgaaggccccagtctccaagatgtacatcaccgatcaccttatgtcctacaaaacgtccgatacgcttgatgctctcaccgatgatcgcagaacggagatgtcctacgtgaagcggcttggcaacgtttggtccgccatagtcgataatgatcgtcttcggattcttggcagtctcaacagaaagcttctcgtcctctgccatcttattcatgtattctgcaacaaattccggtttcacatccaggttgataaatccaggctttacaacttctgctctggaaaagatccggctgtctgacagctgtgctaccacatcatcagcgatcataaacggtgccttgtgatatgctttggctcctgccatagcaccgttacactgatactcacataagtccggtctgttggaaacagtaacttttccataagacggatcataacctgctttttcaaatgctgcggaaagttcttccgccatctgttccataatcttcttcatgtttcaaactcctcatatctttgtttctgtattttatgcttataatgtcacttttcttgaacatgcgactgcaagggcaccataaccgatatggcaggcaacacttaaggaaaggggatccatatgtatctccattcccggaaatacctcctggatctcttttttaaattcttctgcttcttccagatttcctgtataagcagcctgaagacacatctcaccgtcagatgcgtattccttaaaacgtgtttcccaatcattcttcattgccttcagcatggcacgtttggcctgcttcttgccacggaccttggcgtaggcatccagcttctctccctggatctgaagtacaggcttcaggttcagaaccgttccgatagctgctgctgccggtgtgatcctgccaccttttttcagatatttcagggtgtcaagtgtgatataaatactggaatcgagtttctgatctgtaaggatcttcttgatctctgcagcactttttcctgcctcggcaagcatcttagcatccattacagactgtctctgtgttacggaaatccgctgattgtccactacctgaacacgaccattataatcaatagcaagtcccattgcagtagaacaggatgcactcagtccgcttgacatcggaatatgaacgatttcctcataatctctcagaagcttgtcccacagatcacagagatcagccggacttggctgagatgtggagatcggttcatccttcttaagcttctcataaaactcttcctgtgtgagagttacaccttcaagatacattttttcattaatataaaacggcatcggtatcacataaacgccaagctcttcggcctgggcctgtgtgataccgctgttgctgtctgttacaatggcaattttgcccattcttttctctcctcctggtctgttatctcacagttcaaagaattaatgcatcagcccctgatgaactaattctttgaactgctgtagaaagccatgatgttagtgtatcatatttttttctatatcacaattggaaattttctgtgaccttcgctcacaaaaaacacctcgcggaatattaccagtgaacagtaaccgcaaacagtaactaaaaaaaacagctgccatacaaatatttatgcacagcagctgtcacactatttatcaaaaatatccttatctatttatgatctgtgttttatttcatttctcttacgatctttcgaaccggaagaacaaatgtcggagatacggacaactcatccagtcccatctctacaaatctctcagtaagtgtagtgtccgcaccaagctcaccacagattccggcccagataccttctttgtgtgcattatccacaaccatctggatcatacggagaactgcctcatgatgggaatcataaatgttgtcaagctttgcattctgacggtcaatagccagtgtatactgggtcagatcattggttccgatactgaagaaatcaacctcttttgcaagaagatcactgatcataacagctgccggagtctcgatcatgataccctgctccacgtcatcacggaacgggatcccctgttccttaagctctgcttttacttctgctacaatggccttgatctgcttcacctctgttacagagatgatcatcggatacatgatggaaatatttccgaacatgcttgcgcggaaaagtgctctcagctgtgtcttaaatacttccggacggtccagacagatacggatcgcacgatatcccattgcagggttctcctcatgcgccatattgaaataatcgatctgcttgtccgctccgatatccagagtacgaatgataacttttttgccggccatattctgagctacggtcttgtaaacctggaactgctcttcctctgtaggatagtcttctttttccaggtatacgaactcacttcggaaaagtccgatgccttccgcatcattggcaagtacattcgcaacatcacctgtacttccgatgttggcataaaggtggagcttacgaccgctcttggtaacagtttccttacctttcagctctttaagcattgcacgctgtgcaagttcatcggcacgcatatcctcatatttttttagggtctctgcatccggcccaacgatcagatttccgctctttccgtctacgactgccatcttaccatccatggactcatcgtattcaatattgatcagcgccggaatattcatggttctcgcaagaatcgcagtatgtgagttagaagaaccttttcttgtgacaaaagcaagaaccttactcttatccatctgtacagtctcacttggtgcaagatcctctgcaactacgatcaccggctcggatgcttcaagctctccatctccatggccggaaagcacacgtaccagacggtctgagatatcctttacatcagctgctcttgctttcatataatcatcgtccatctgtgcgaacattgatgagaagttatcaccagttgttgcaaccgcatattctgcatttacagactctgtacggataatgttgtggatggaatccagatagtcatcatcatccagcatcatctgatgaacctcaaaaattgccgctccggactctccaacttcctgaagagccttgtcataaagcttctgaagctgtgccacagcctgctctctggctgcctccacacgctttacctcttcttccggatcctccacgtgaacacgtttaacactggcgtcaactttctggaggattgagatcttaccgatcgcaataccggaaaatacagatttaccttccaaaaccttcatgaaattatctccttctgtttttatatttgcccacttatgacgtattatatcacactatccaaagattctgccacgatttttttatgatctctaaaaaacctgtaaaaactctatttatactttctttttttgtcatatatacagcaaaagtgacaaaataaagaccgcagagcttcataaaacctgaacaatactttcagatataaaaataagcatctgccgccggaatccttccggcaattgcagatgctatatgtatgtatatctttttattcactgcgaagggcatcgatcggattaagattagctgcctttacagatgggagaagtccgaagatcagaccgatcagcatggaaaataccacagagccgatgatagccggaacgctgatggctgttggtgctcctgacacctgagacaccatttttgacaggatgatcccaaggaccacaccaatgattcctccgatactggtcagcaccgaagcttccgtcagaaactgtcccaagatcactttttttcttgctccgatagcttttttcagtccgatctcgctggtacgttctgtgacagatacaagcatgatattcataacaccgataccaccaacaagcagggagatacttgcaatccagatcagctgctgattggtactttcgctgagcttctggagattcttgaccttctccataatgtcttccgctttatatttaaagttcgatttgtttttttcattctggatccctgtattcagaatatcctctgctgcttttcctacagaactcatattatctgtgctgtctgcacggactgtcacattttgcggctgatcaaatttaaatgcaacaggccaggtaatatccgggatcatcacgcttcccatgatcgtctgcgaatattcctcgtactcagaaatcgtattgatcttcggcatgctgtcctcactctgagtgatcacacctacaataatatacggttctgatcccacctcaatggttttccctacagggctctcacttccgaaaatattctgtgcagcattggaatccacaagagcaacctttcggtagctgtcataatctttttgtacaaatccccgcccggactggaccaggtatcccatcgttttcagataattgctgtcgatcccgtacacggttccgccctgaaagcttgtgtttttataataaacactggcagactggctgctgtaataaaatgtagaactgatcacatgatccaagtctccgatcgccgttttctgggaatcagaaataaccggcggtgtggccgagcttccgtaagaaccataatccatatcgtatgtactgtctccgtcatagagcataacctgtacggtattgtttccggacccgatcagatcttccttgatctgctcactggtacctttgatcgtagatacaattgcaataatagatgcaataccaataataatacccagcatggtcagaaaggatctcatcttatgtgaccatattccctgaaaagccaggcgtatattttcaaacatgaaatttctccttcctgttatttattcattgtacatatcatccaaagtcacttcttttgtcttggctccctccttcacggcatcaccatatgggaaagcaagaagatcatcggatttcaggcctgaagttacaactgcataatatccgctgttcacaatgcttcccactgtgatctgctgctttttcagtgttcccttcacgtctttgtatacatagctggttccattttccgtacggataaatgccttcatcacaaccatactgccttcggcaagtttatttgacttcagagataccgtcacataatcctggtcggtaaactgcaatgaacgatctgtgatctctgcattaaaggtgtaatacgatacattgggattagaatctccaccataataagcatttgaagaatccaccgggtaatcggatacattcagtaccttcgcctcaaagctgccggaattataactggtacactgaagaagtgttccctccttcatctgatccagcatcagttcgctgaccgttccggtaacataaaaaccatctttgctttttactttcagaaaagcatctccattataagaacctgtgacttcatctccgatgtaagcaaccgttccatccagtttgcttgttatcagcttgttttttattttgttctccagcttagtgattttcagattattttcctcaatatccagtttcaaacttgcgatcttgtttttctggatcttgatcgcatcctctcttgacatggttgtgccatcagtaccgtcatctccatcaccgctgtcatccggtatctcatcatcatttttgtcatatttggaagcctcgtccagtgtaaattctgtttccgcatacatatataccggattttcaagaagacttccatcgatcagataatatcctgtacaggaaagtgttctgtcttgaaaatcagcaatggtatcattctcatgaaactccagctggaaccagctaccgcctttctggaccactttggttccatcctcactgtatcccgccattctgttaaagaaggatcccatcaccgtaactttgcctttggcactgcttacaagaaaaacatagggatcttcttccgtaccggttcctgtaaacggctgagaagtataatccagcttctgataaaattccggttcaccatctgtgatccccggaatttccggttctgttatattgggatcaggaagctcattgggtcccagtgtgggagtcggtgtcggagataccgttggggtgtcatcttctccggaaccccagtccgtagtctctccgtctgtaatatcattggcagtaggatcctggtaggtcggatccatgatcagatcctcatcggatgcagttgtatcctcttccatatccgctgtgtcatctccggtcatctgctctgtttcactgtccgtcgtttctccggacggcatttcttcggtaactttctctgcagaatcttcaagatctccttctgtatctgtaaaggcactgagaagtaatggcctggaggaagccgctgcaagatagctgccatctgcagtagccgcggaaccggtagttgactgcatatcctcgtctccgtcacttccggaaggtgtatccgtatttgtcatttctccgtcatttcctgtatcaccacctgtaagattcaggtccgtatcatcagtactgtctgtactgtcttcgatgggacctccattctgaagacttgtcagacggttctgtgctttggtcagatcctgctcctgcttctgctgtttcagctttgcaatattcagttccatctctacaagtgtcatatcaaaggagatcagattatcgcctttttttacatcatcaccctgggatacatatattttctcgatgatcatatctttatccatatttacattctgagaaacattcgtggtgatggttccatccagtgttgtctccgaataccagtccgtctgaagattgctgacgctggttaccggcacctctgttaccttggattctttcacatgcataagccctgtgtagattcctccggctgccaatgccgcaaccagtacaccaacgatcactctcttcaccactttcattctatcacctcttttcctgcagctcaccgtcacggatcataacaacccgtttggcatgtgccgcgatctccgggtcatgtgtgatcatcagcacagaaactccctcatcgttcagcttctgaaacagttccataacctgtgctcccgatttcgtgtccagtgccccggtaggctcatctgccagcaaaagcttgggattgtttacgatcgctcttgcaatagccactctctgcatctgtcctccggaaagctggttgggcttaaaatccactctgtcggcaaggcctacacgctccagagcttttcgtgcacgttcccggcgctcctttttgggaacccttgcataattcagcggcagttccacatttgtcagcgcactctgccttggaaggagatgaaagctctgaaatacaaatccgatcgttttcagacggatatctgacatctcattctctgtacatttggcaatatcttctccattcaggagaaaagttcccttggtaggtttgtccaggcatccgataatattcatcagtgtagtctttccggaaccagaaggtcccatgatcgccacatattctccctcctccatggaaaaatctacatctttcaatacaggtaccgtcattttcccctgttgataatccttatatattccttttaaatccaaaatcattctgtcggcgctccttccatcggaacaaggtcatctcccgaagaaatatcgtctgtcgcatccatcatgtcactgtcgatcgctccatcttcgatcatttcaggctctgagccatcactttccgtgtacgcagaatcatcaatactttcatcatcctcggaatcatcccacatcgccgctgtagtctgatctgcagtaccttctgtgacagacataccttctttcagctcatctgtcggaaatgcgatcttatctttttcagaaagtccgtctgcgatctcatattccccaagatcttcatcatactgtcctaatatgacatctctcttctccagcttgttctgaccgtttgcgatccagacatatgggctgtctgtatccgcatccacgataaaataatcgttcagccagataccggacttcttctcatcctgtccttcgtccggttcaatatacacatgctgccccagcatcagaccctcagatgaatccagattcacataaaacggataggtactggatgatgtctgatcatcactggcactggacattccgaacattgccatatccgaactgctgttgctggtagaattatccaggtcaacagagcccatggtgcccttccaggtttttgaagaatccaccctggaacgaatgatcacaggagttccctctatgatcgaatcacggtttatttcatttaccgttccctttacacgataagcacctgtactcaggatcgtgataaatgcattgccggagctgtttccggaactggaatctgtggaatccgtcgtgccttctgtcagcgtatcctccacaccctcagaatcatcaccgcccatcttggatgtatcgatcttctggatcactccatcgatctcactgcgcacctcggtattctgcgttgcctgggaaagcttatcgatctctgcctgtttgcttttctgatcatattcattcttcttgagattcattttctgtgtttcgatctctattgtataggaaagctgattatctgctgtagctttctttttctcagcttccagtgtagtgatctgatcagatatacttaactgttcgtttttcaggcggtccaaggccagctgtgcttcctgaagactttgctggatacttccaagatcatactgaaaaagaagctgccctttcttgacttcctgaccggtctttacctgaacttcttttacctttcggccgctttcgatctttacctgaaccgtttcctgcggttccacaacacctgcatatcggttttccactccggaatccatttccgaaagcttgcttatctttgttacatatacaatatcgctgcctcctgcggaccctgcatgatgtgtataataataccatccaccggctccgataccggctgcaagtacaaggaccccaagtgcgatcaaaatacgttttttcatatctgtccccttttctcagcatcgtactaaaactatctgttgcttcaaacatcatagcagattcactctaaaaagaaaagtccctgaagaaaacgatgcagatttcacagatttttcataaaaaagtctcctttttctccatttttgcgatattttgactttcggtactttatctgctaaaatgttgtaatataacttttttgaaaggaaagaacaatatgaagacagtgaaacatctgctggctttcttgatgatcattcttctctcagtttttttatgtagctgctcccagtcggccaaagctcatgcggagaaggcgatcaaaaaagatctggatcttcttaaaaatctggactctgaaacaaccatgcagtacatatcctatcaggaactgtttccggattctgatgacagcacaaagctttctgctgacataaaagaagtattttctctcttctttcagaatttcgattacaaaatcctggatatatccgttgatagcgacgaaaaaaatgcttctgcgcagcttaagcttactactctggatgctgaagctcttgccagtgattttgtttctgcaagccttcaggaagaaatactggaaaccgcctccggtaaagaaaatgataacggaaattccctggagcagcgttatctgctcctgtacaagcttctcaagaataacacgtacagttctgcagaacgcaatacttccatccaactaaacaatcttggatcttcttcagaacctgactgggagattacgcacagttcctctctcgaaaatgatctggtcggtggccttatcacctatctgtccgatcctgatcttgtgccgcctgccgaaacgcttaccgtctatctgaaaacgcttcaagaaatggatgtaaagcagatggctaattatttggggctggattccattctgaacacttcagattcggcaaaaaacgccattgcctctgcccttatggaacagtttcactcctgttttaactacaaaatatcaagcacctctgtttccggatatcttgctgaagtggacgcagagcttaccacatttgacagtaattccattcttacacagtacgaaaaagaattgaatacttatctggcttctgctgatgcagtgatcgacggttcccagaagcgttacaacaaatcacatgaactgcttctggacagtatcaggaataatcaggcaaccataactgccactgctaccttccatctcacaaacgatggtgcatcctggaagcttgagaatgcaggtaccgaactgggcaatgccatcttcggaactcttaccgcttcaccggttcctgaagattctaccgaagataacgaataaagaataaaagctagaaaacccgtgaatatctgctttctctgacaggaaagcgtgatcttcacgggttttttatattcttcttttttatattccggatatgatctttataaaaagcaatgcaaggactataagaataataggccgtatgatccggcttccgtttttcataaccatacctgcaccggtataatgtcctgcgattgagaacactgacgctgcaattccaagcatgatcacaatctttccgctgagcagaaatacaacaagagccgctacattagaagagaggttggtaaccttcatggtaccggaagcttttgccacactcatttttcccaatcctgtaaacaaaagcaagagaaaagttcctgttcctggtccataaaagccatcatagcatcctacagcaagagagcatacggcacagagcaggatctgtttttttctggcgatctcgccacccttctcatccatatttttcttgcgcagcacataaaaagcaaccaccggaagaaccgggatcagcatataacgcaggagcttatcactggctataagagcaaggtgagctcctatggaagatcccagaagcgccattggaatacatggaagcaccaagatccagtccacaaatttatttttgcacagacggacagttgagatcaatgttcctgttgctgatgacagcttgttggtggcaacagcattatgtacaggaactccggccaaaagataagcaggcagggagatcagtcctcccccgcctgctacagcatctacaaatccggcaagaaatacaagtggacaaacgatcagaaatgtatagattgtcggctgcatgatcttttattcttcctcttctttctgcggctcaaggtcaagtcccagctcatgaagctgtgcctcacttacctggctaggagactgagtcatcagacaggaggcatccttaaccttcgggaatgcaataacatcacggatcgtatctgcctttgccataagcatgacaagtctgtcaagaccatatgcaagtcctgcgtgtggcggaactccatatttgaaggcatccagaaggaatccgaactgctcatgtgcagcttcttttgtgaagccaagtgcctcaaacattctttcctgaatatcatcctgatggatacgcacgctgccgccgccgatctcatttccgttaagaacgatgtcgtatgcttttgcacgaacctttcccggatctgtgtcaagaagcggaagatcctcctccataagcatggtgaacggatggtgcattgctgtaaaacggttctcctcctcgctccactcaagaagcgggaactctgttacccatacgaaacgatactcatttttatctaaaagatccatctgttttgcaagctcaagacggagtgctcccagtacatcgtataccaattttgtcttatctgctgcaaaaagaagaagatctcccggcttgccgtccatagcttttacaagagcatccatctcttcatctgtcataaacttggcgaaagaagattttctggttccgtcctctgcaatggcaatgtatgcaaggccttttgcgccataaccttttacgaactcaacaagcttatcgatcttctttctcggcattgcgccctgaccttctgcattgataccccgaacacttccgccgttctcaagcgcacctgtgaacacaccaaatccgcagtcttttacgatatcactgacatcatgaagttccataccgaaacgcatatccggcttgtcggaaccaaaacgatccatagcttcctgccaggtaattctctggattgggagttttacatcgatatccagaacttctttgaacaggaatgcaagatatctctcgttaacatcgataacatcgtctacatcaacaaaggaaagctccatatcgatctgtgtgaactccggctgacggtcagcacgaagatcctcatcacggaagcatcttgctatctggatataacgatcaaatccggagcacatcagaagctgcttgtacagctgcggagactgtggaaggccatagaagcttcccggatgaacacgtgatggtaccagatagtctctggctccctcaggagtactctttccaagcatcggtgtctcaatctcaagaaatccctcttctgtaaagaactgtcttgtaagctgggcaaccttgctcttcatcatgatatttctctgaagatccggtcttcttaaatcaagataacgatatttaagtcggatctcatcttttgtcttgctattctcctcgatcgggaatggaggaacatctgcctcagcaagaacacggagggattttacacgaagctcgatctcgccagttgcaagattctcgtttactgctcctccacgtttctctacggtaccggttacagcaataacaaactcactacgcagtttacctgcttttgtaaagccttcctcgtcaatgctgccattctcaaaaatcagctgcatgatcccggaacggtcacgaagatccacaaatacaagacctcctttatttctggcttttgccacccatcccattaatgttacttcttttccgaccatctctgtggtcacttctgcacatcggcaagttctgtgcagtccctgcatgctttcagccatctctttatcctcctctgactatttttttcatagtcattttaatttactctgctatctccgttttcagacgggcagtttcagtctctgttgaaaaattctacatactctgtataaccatctgctgccagctggtctttctggaattttttgttctttttcatgatagagatattgatctgtgtacctgcacttctttcctcagttgcctgtttcaggatattcagaagcttgtctgccggcatgttcttctcgatcagatatgctttcttgccattcttggttggaatctcatagcctctctcaagaagcagcataacgattctctcaaatccaatggagaaaccacaagcacagatattatttcctgtaaatttaccgatcatctcatcgtaacgtccgcctccaccgacgcttccgccgaactcatccatggaaatctcaaagatcggacctgtgtaataggacattccacgtaccagtgtagggtcaaaggacattttgaagtctgctgtttttacagattctacagtgttgatgatcgtttcaagatcctctgcaatacctgcttccagaacatcagaaagtttttctttaatataacggacaccctcaacatcgttggtgatctcacggaaaagtccaagataagtgtcaatgctctctttcgcaaagccctctttctcaagctcctctgcaactccctcgatgccgatcttatccatcttgtcaagaataataaagacagtatcaaagctctctgccgggaatccactgtactgagccattgccttcaggatccttctgtcattgatacggatcgtaaagttatggaaatccagttttccaagaagtgttgtagttgcaagtacaagctcgatctcagcaagataggtcggctcacccaggatatcgatatcacactgcataaactgacggaaacgacctctctgcggacggtcagctctccatacatttcccatctgaagtgccttaaacggagccggaagctcgtttgcattattggaataatatctggaaagcggtacggtcaggtcatagcgaagtccggaatttgtcagatcattctctgtttttgcagtatccagtttcagtttctcgcctctcttcatgatcttgaagatcagcttttcattttcaccgccctgcttgctgcagagattctcaatatgttctacacagggagtctcaattgcggaaaaaccaaaggttccgtacgtctctctgatcatattcatcacatagttacggattgccatttccttcggtaaaatgtccttcattcctgtaactggtttcttttttaatgccatagtttcctcctttatgaatcaccctctgaaatgcaagaaacacctgcatgtcaaagtttttaatctcatcgatcatcagtcttaaaacttcatcattttccagagctttccgatatggtctgtccatactcaaagccgcatatacatcacatactctcaggatccttgcacccatagggatatcctttccgcttctgttgctgggataaccgctgccgtcaaaattctcatgatgataaagaatactttccagaacataatcggaatatccctggtctttcaggatctcataacctaatgtggagtgcatgcgaacatatttcagttcttcaatgaccatcggattctgctcttggccattaatgtatccttccagtttcagtttgcctatatcatggagcattccggcaatagccagctgataacattctttctcaccaagaccaagctcctttgccacatcataggcaaggttactgacaacaaccccatgcttcagctctgcggaaagatccatttccaggatccggtcctgcgtagtttcacttatcttctgtacgcttttcaaggatccgtctctcctttccgtctacagccattttgcaatgccctcgcgttttctctcgatcatttcatcgatacgtgtgatataattgacaacatccttcacattctccacacgctcaatgcgctgtccgtgatcaaacacaagtttggaggaaccacctgcacccagtgcgatgatcggctgcttttcctccataatcagtatattgtaaatccctgctttgtcaacctcagaatacccgacgttctcaaaattccccttcatattcttctgtctgtacagataatagggacccattcccatctcgtaggccgttttcatagtcagatccatgatctcctgattgttttcaaaggtcatctcctggtatttatcacggaaaatattcagtcttgccgcacgcttcacagcaagagaatgtacggtcaggctgtccggcccgagagcttttacctcgtccagtgtatgctgcacttttgtgatatcttcgccgggaagacccacgatcagatccatattgatattgtcgaatccggcttttcttgccagatgaaacgcattctttgtctgttctactgtatgacgtctgccaatgatatccagggtttcctgattcatggtctgtggatttacagaaatcctggtaaccggaaactcccggatcgcctgaagcttttccaaggttatactgtccggtcttcctgcctcaaccgtaaattcttccagctcctcacagggaaaatattccgtgatcgcgccaagaagtctccgaagctgatccggctccagtgtggtaggtgttcccccaccgatataaaccgtatccagcttccggtttttcatcatcccggaaacagcccgaatttcctttaccagcgcatccagatacgcctccacatatttacgccatctctccagcggataggaactgaatgaacagtacagacagatactcggacagaaaggaatgccaatataaaggctgtaaccgttttcataatcaatgtttttcaggatatcccgctcacgatttgcgatggtaactgcaagagctgttttctccggacttaccagatactgatctctcatatatctggcaatctccgtatttttcattccggactccagcattcccatagccattttcacaggacggatgcctgtaagatttccccagggaagtgtctttcctgtagctttggaaagcatctgatacagggcgtatttgatcgcgtctttattttttctgcggatatcatgggcatcattgcaagaaataagggcatccgaagcttctccactggattgcccttctatcacagccccatgagctgtttttttctctattccgttgttgtaactgatggtataaccttcttcatcacgtgagacccggaagcggatatcataatccgcatcatcctcttcataaagagaaacgatctcatttccgggataaaacgctttgatcagctcatacacatcatgctcaaaatctctgttctgaaacaaaatgccaatcttatacaaatggattatacctcttttcataaccaatggttgtggatgcgtcatgccccggaaatacttctgtatcctccggcaaagtatccacaagcttgtgaaggcttcttacgatctcagcagaacttccgccaggaaaatcagttcttcccacagagccgcaaaacaatgtatctccgctgaaaagcacaccttcgtctttgatataatagcagcagcttcctttggtatgtcccggtgtgtggaacatctggatggaaaatcctgccgcttcgaaaatctgcccgtcatccagaagaacatccggcttaattgaacaggcacttccataaacagcagtcatatttatcgtgggctctgccagcatcacttcttcctgcatgcatgcataaaccgggatctgatatttttccttcacttcctttacagccatgatgtgatcaaaatgaccatgtgtcagaaggatccccaccggttttccctgcataagagatactttctgaaaaactttttctgcatagtctcccgggtctacgatcagcagttctccggtctctttatttttcagaaaatagcagttggtaaacacctggcccagcacacactgctgcatttcaagtttactcataaaaattcctccgtttatcgggtcagcccgttgttcgctctacatcaagaacactttcaacctgacggatcttttcgatcagagaattcagttcctgtttgctgcatacattaaaggacatggaaatcgtggcgcgttcctgcttgttggtacggctgttaatagaacgaagatcgatcttcctctctgtaaagatcttggaaatatccaccagaagtccggtacggttatttgcataaacctggatctccgcttcgtatttctcggaatccgctctgtccggcatctgccactctgcttcaatgagacgtttccggtcaatctcaggcatgttgagcacattcacacagtctgtacgatgaatggtgatccctcttcctcttgttacaaagcctacgatctcatctcccgggatcgggctacagcatttggaaaaacgaactgccacatcatgaatgccttttactacaatgccactcttactcttggcaatgtgaagcttctcctgtgattcggaagctgcctccaggacctgttcatctgtaagattcttcttatgctccctctcataggcttctaccagcttgttaaacacctgaccttcttttaggccgccatgtccgatcgctgccaatacagaatcccagtctcggaaaccatatttatgcattaccgattccatatactgtggcttggtatatatgcctggtttaaagcccttggtcttggcatactgattcagcatgtccttacccttcaggatattatcttccttcagttctttcttaaaccactggttgatcttattcttagcctgtgtgctctttacgatcttcagccagtcacggctggggccctgagaattctgggatgttatgatctcaatacgatcaccgtttttgatcttatattcaataggaacaagtttaccattgaccctggcacctaccatcttgtttcctactgcactgtgcacgctgtatgcaaaatcaataggtgtagaaccattgggaagtgtttttacatctccctggggagtgaaacagtaaacactgtccgcaaaaagatccagatcatttttcagaagactcatgaactcccggttatcggacatgtcgcgctgccactccaggatctggcgcagccagttcagcttctcttcctcactctttccaggtttcttaccatcggaagtttccttatatttccaatgagctgcaataccgtattctgcggttttatgcatttcaaatgtacggatctggatttcgaaaggctgtccgttaggaccaataagcgttgtatgcagagactgatacatattggccttcggcattgcgatataatctttaaatctgccggggatcggcttgtacatctcatggataacaccaagagctgcataacagtccttcacagtatctacaatgatgcgtacagcaaacaggtcataaatctgatcaatggttttatcctgattgaccatcttcttatagatgctgaagaaatgcttcacgcggccatccacctgtgccctgatattggcatcctccatatgctgctttacctgtttcacgatagagttaacaaattcctcacgggcgcttttgcgaagagcaaccttttctaccagatcatagtaaacatccggcttcagatacttaagagaaagatcatccagttccaccttgatcttggaaataccaagccgcatcgcgatgggagcatagatatccatggtttctcttgctttctcctgctgtttctctggtctcatatactgcagggtacgcatattatgaagacggtccgcaagcttgatcaggatgacgcggatatccttagccattgcaaggaacatctttcttaaattctcagcctgaacctctaccttatccttggaataggacagctgacccagtttggtaacaccatctaccagaagtgctacctcagaaccaaattccttttccacctcttcatacgtcatccaggtatcctctaccgcatcatgaagaaggcctgccactatggtttccttatccagctcaagatccgcaagaatgatcgcaacacagagaggatgaatgatataaggttcaccggatttacgtttctgatccttatgtgcctcactggccactttataggccttttcgatcatggaaatatctgtagacggatgatatttcttcacgctttttataagctcctgataaagaacctcagggcttgtaaaatcatgcatggatttcaccgccgcatctgccttccggacagactctcttttttcttcttccttctgtatctcaatgttttgtttttccgtattttttgtctctgccattaaatcccacctgcctgtgcacaatttcatactgccgtatgactacaacagttcacatccccttccaccgacaaaaaatcattttccgtcgtaacagatcacagatgccacatcataacctttgagacgctcacgtcccttcagacctgcaagctccataaggaaaaccaccttgacaacctcgccgccaagctcctccacaagcttgatggctgcttccacgcttccgcccgtagcgatcaggtcatccacaataacaaccttctgtcccggcttgatggaatccttatgcatctcgatagttgcacttccatactccagatcataggttctggaaacggtctcacatggaagttttcctgctttgcggaccagaacaaagggtttgtgaagattatatgcgatcggcataccaaagataaagcctctggattcaagacctgtgatcacatcgaactcctcaccctccagacaatcctgcatagaatcaatggcaagctgtaatccatccgcatcctgaaggacgctggtaacgtcacggaaaataatccctggctctggaaagtccgggatacttcttacatattcttctatttttttcataataacctccaatggtttaatttgtcaatcagatgttagatagtatagcactttttctgtagggaatcaatgtgcaacccgacagaactcgcggaattacgacaggccctggactgcatattgcccagtacagagccttctttcctgttttacagtcaattactcgctgtcaggatctgcattttagtgataccttctcctgttattctgtaatataatttcggattacgatctgtaaggtctctcttccctgataacggttgatctcaggataatatgtgaccgcaatacttccacatttttttattctatcaacaaattcatctgcttctccaaaatatactgcttccactacacagccggtactgtctgacagctgaagctttgccacattcctatttttgccaagaatacggctgcttaaaacccgaagtcccttctgtgcaaaaatcggtttggtatttccctttccaaaaggctccagcagggatatctcttccacaagttccttatttatataggaaaccggcattggcacatcgatcaggatctttggagccagatccttttctgtcagagtacagttttcgtttaaccgtctgcggaactcttccacattttcttctttaatggataatcctgccgccataggatgaccgccatactgttccatcagatctccgcattttaccagttcctcaaacatggaatagctttctatggaacgtccgctgcctttcaccattgtttcaccttttgtcagaacaaagaccggtttattgtacttttctcggatacgtcccgcaataattccggccagactttcgtgacaatccggtaaatagatcacaagaaccctgtcctgtccgatttctgtctcttccacaatacggattgctgcttcctttccctcttccgtgagagcttttctgctttgattcaacgcagtcagatcaccggcaagttttgctgcttcatcttccgtctccgcacagagcagtttcagggaacgtgcagcggtatccagtcttccactggcattgatacatggtcccagcacaaaccctacatgataggcagtgatcggcccatcctccaggccattggcacggatcagttcacggagacctttgttagaagtgtgggaaagtcgtttcaggccttcctttacaaggatgcggttttcaccctgaagatccatcacgtctcccaccgtggcaatggctcctaattccagaaaatcttccagctctttttccggaatcccgcatgcctcatagagagctgtcaccagcttcaacgcaacaactgctccgcacaatcttttctccggataattacagtccggctgttttggatttacaatggcatcagccggcggaaggatcagttctcttccatcttccgtttctttatagggaatttcatgatgatcggttattatcaccgtcattcccttctctttagccatagtgatttcattgtacgccgcaattccattatcacaggtaacaattacgtcaatcccatcattcactgctctttcgatcaggtgctcatggattccatatccgtccgccacacggtccggaatatatgtatctgccagagctcctgcacgcttcagtcctttgatcagaatgaaggtcgatattaccccatcaatgtcataatcgcctataatacgaatgcgttttttttcctttattttattccgcaggatctccactgccttatccacatctttcatcaaatgtggagaagccagttcgtccacctttccataaagatatctgcgaatttcatccctgtcctgtacatcccggtttcggattagtctggcgatcaccggatcaattccgaactcttttccaattgccgcaaagtccgcccgttttgcagcaacaacccatcgttccatgttgtttcctccttgatgctttgccgctttctttcttcaaagcaacacaataaccgtattgtaactcatactcctgcatagctgcaagttttttatgccacacaaaaaaacgttccgccaggaaatattctttcccggtacggaacgtttctgttattcagcaattttattcagatttctcctcatcattctgctgctttgctgcctcctgcgctgcaaggcgctcggcaactcttttacggtttttcttcttcggctgctgagctgtctgctgtccggatggctgttttacctttttctcagatttctcggaagaaatctttgcggaagctgctacagctgccggtgctgcaacacgattttttctgaatgttttcatggtgtaccacagagcaccagtgatgcatacagaagaatatgctccaccgatgatacctaccatcagcggtgctgcaaattctttaattgaggaaacacccattacataaagaattgcaaccattacaaatgttgtcagggatgtgtaaatgcttcgtgtcagagtttctgtaacactggtatttacgatctctttcagtttctcatcctcaactttctttctgcctctcatattctcacggatacggtcgaagatgacaatagtagcattgatggaataacctacgatcgtcagcatacacgcaataaatgtatttcccacagatgttctagaaataacataaaacgcaagtacgaccaggacatcatgaagaagtgcaagtactgcactgcttgcaaagcggatatccttgaaacggaaccagatgtaaagaagcatgaagatcgcagctacgataaccgctacgatagcgtctcttctcatctcattgctgacagtagcggaaatattctccgatgtgatcagacttgtatctacatcaaaattttcctccaatgccttattcagtgcttctcgttccttaagatccagagaacgtgttttgatcactacctgattggttccctgcaccttggtcggctgtacattcttatcacctgttactgcctcaacaaccggtgttacctcggaatcgatctccttgatatccatctctttattgaaggttacattggtagaagtaccgccggaaaactccagactgtaattcatggctttgtcaccgatcacattactgtggaccagcattcctacaggtccgcaaaggatcaggataatggaaacagcaaagaagatttttctctttccaacgaaatccacaaccttacgttccttggcaataccatagaatttcgggtcacgaacaccaattgcgtataccgcattaataacaagcctggatataaccagtgctgtaaacatggagatcacgatacccattgccagcgtgtaggcaaaccccttaacagaaccggagccaagccacatcagcacacaagccgcgatcagtgttgtgatgtttccatcaaaaatagcggaaaacgctttgccgaatccacttttgatcgctgcatggacagaaaggcctgccgcgatctcctcacggattctggcgtagataataacattggcatccactgccataccaatgcccaggatgatacctgcaatacccggaagcgtaagggtgatatcaaaggcattcagcgtgatcagcattaaggttgtataaagaaccagtgcaacagatgcaaccagacctgggatacggtatgcaatgatcatgatcagcataacgatcacaagaccgatcgctccggcttttacacttgttgcgatggcttcttcaccaagctgtgcagcaactacgctggaacgaagctcggtaagctcaagacttaaggaaccgattcttatgtaagaagcaagattctgtgcctcttctgtacttgccattccggtgatctgagcttttccgccggaaatctcctcatttacattcggagcgcttaaaacctgatcgtcatatacgattgcgatctgctttccaacatttgccttggtagcttccgcaaatttggtttttccattctttgtaagagtcagactgactgcatatttctgggagcttgtggatgaatcctgataagcacctccctcagcgtctgcaacgtctgtaccttccagtacaacagatccggctttctggatatcctcaatacttcttgcaagaacatatccactctcactgtttcctgttgtaaaattctggtttccgtctgcatctgtctgatcgataaaatacagagaacctggctttccaagttcttccaggatcgcatttgcatctgatactcctggaatctcaatggtgatacggttggaaccttcctgatatgcctgtgcctcagtactgtactgagaaacacgctgctgcatcttgtaaacagtatcggacatgtcttccttgctcggattgctgtccttagcctggtatgtgatgctgacaccgccggcaagatcaagtccggtgttgatattcttagccgaacctgttcctgtaggaccaatgcctaccgcagccacatagcagaagaatactgtgacaattgctgtcagaagcagcactgcaattcctctacttttcttcattttctttttcctctcttattccgccaaagcggcttttatcatgatagcgcactccacacgcttcctctgaagttcgcatccgatcttataattcccccggatatctccgccgaaatggtaaccatttgccgcacagccgccgctgcagtagaatctggcaaaacagtctttacagtccggtttcgtatagacgttacatcttccaaagtcttttacgatttcaggctttgtgattccctcgtctacattacccataaggtactgttcctcacccacaaactggtgacatggataaaaatctccccacggagtaacagccaggtactcggttcctgagccgcatccggaaagtcgtttgtatacacacggaccaccggtaaggtctatcataaagtggaagaagttgaatccttttccctctttttctcttttgatcatttcttttgcaagaatatcatactgttccaggatctgtgggatatcctcctcacggatcgcatactcttctgtatctgctgccacgaccggctcaacagaaatctgcttgaagccaagatctgccagatgcagaacatcctgagagaaatcaagattatgatgagtaaaggttcctcttacataatacttgtcctgatttctggattccgcaaatttctcaaatttcggcatgatcagatcatagcttcctgcacccttacggaacgggcgcatgtagtcatgaacttcttttctaccgtccacgcttaagacaacatttcccatttccttattgcagaattccatcacctcatcatttaaaagaacgccgttggttgtcagtgtgaagcggaattttttgttatgaagtttctcctgttctcttccgtatttcacaagatcctttacaacctgccagttcataagaggctcgccgccaaagaaatccacttccagattctttctggagccggaattagcgatcaggaaatccaacgctttttttcctacctcaaaagacatcagcgcacgtcttccgtgatactctccttcttctgcaaaacaatatctgcatgccagattacagtcatgagcaatatgaaggcaaagagcctttacaacggtctggcggtttttggtaaattcatcaatgatattctcataaatatcttttgtaaaaagcattccctgttcctgaagcttcttacattcagttacagaggtttccacatcctctttcttaaaacggtcgccaagcttctcagcaatagcagccgcttccatgccttcttcaagatacggcagcacctcataggttacttcatctactaggtggatacagccgctgttgatatccagcacaatattatatccattactttgataacggtgaatcagactcatcttcccgcaatcctttctaaaattcttttataacccgacaaaacgcgccctccggcgcgttttgctggatacctgttactttcagataaaacaagtgaagcagcggatttcccgctgctttccactcattcaacggctgcttcttatttatgctcgcagctctggtttcctactgtacaggaagtcttgcaagcagactgacaggatgtctgacattcgccacatccacccttcttaaccgtgttctgaaggttctttgtatttaatgtcttgatatgttccatgatatatcctcctttatgtattctattcttcgcctagtatagcataaaatcatcgattttcaaagcatttttttgtaagcttttacgacagcatcccaccaatggctccgccaccaagacacatgaaaaaagtagtcaacgcatgggcaaaggtcatatcccatttcccctgtgccagaaaagataccagaagcagcagaacataataggaaagcccggtaacgatcccccatatatatcggtctttccgtatgatctttcccgccataaaacctccgaccaggcaggatactacataaataataatgatccccaccgccgccgttcctcctccaaattcaaactgaaagagcagaaacgccagtatcagaagaaaaagtcctgtcactccataggctagcagcaatgatcgtaatattgcttttcccctcataaaaaagccctcccacagtcattatatgggagagctttttctcttattcttattcattacttctttcttttcttaaaaaacactgctacaccagctacaactgccgctgccacaaacaagatcacaaacggaaggatctgagtgttatccccggtatttacctgtttcttggatgttgttgcagaagactgttcttcagcctccttctccgccgtatcactgttctgagaagaagactgttcctgatctgtgctatctgaagtcagattctgagatgtctctgccgtattggtgtctgtactgtctgtttctgcagaatctgcagtacctgaagatgcagtatccgaagatgaagcatcagctgcaggtgtaaccgttgcaccggtattgctttcagcatctggccctaccagagatttacttccagcgatgccaaatgggctgaatgaatgtgtactgaaagtcattgtggcaccatccatgcttggaatgatggtctccattgcgccattatcaagaaggtgttcaatcgaatatgtatagccagcctttacaggtacagtcacactgatatactccccatccggaattttatactctgtattattctgtgtatcccagagttcaaactcataggatttaaagattgttgcatcttcttcattggtaaactgatagtcctcaccaccagaaacacgaaactgcacataccacggaagatcgattcctgatacagttattccatcacaggtatgattttgagacgcaatttcctctttttctgtttctgtcagatcggtagctgcattctgagggcgtttatcctctgtatcatctttcctgtcaaaaatattatccttgttttcttcagtatcaggagtctccgtaatttccgggatcgcggtaatttcagcatcgttatttttttcatgcttctcatcgtctctattctcagatgctgcatcaggatccataccatcttctgccgccggagttatcgttacagcaggagtttccacagcttctgcttcttccccatcctgagttttattatcctcagatggtgcagctgttacctccggagcttctgttatctccggatccctgttttcctctccactggcatctgctgcatctgttgtatctgaagaatctgaagaagactgctccgtttttcctgttgtctccggatcttctttattttcctgggcactgtcatcctgcagaccttcgttcttctcctcattctctgcagtgctgtcctctgtttcttttacagaagtatctgcatcactctcattgacgtcggttccattttcctctttatcatcggttccataggattctcctgaatctgaatcagaagaatcggaactttcctcactttcggaattttcctctgtactgtcaatgctgctgaccacaactgtcacggaacctgtaagtgttcctgaattactgtcccaccccggaaggcctgaaaggtcagcacctgcagcaggtttgaacactaccccacaggattgcacacgtttgtccggaacataagaactatctgcccaggaaagagttccatacgcattagatgggagcgcaatgttagcaagagctgtagggctgtcaatagttatattatccgggatcacagcaccggattctatacctgaagagttctccgcatatgccggaaaggtctgtcctccgatcagtgtcatggacaatgccgctgctgccagtattgaaaagcttctgctaaatgtaacctttgtgttctttttcataataatctgcacctctatattcaaaatctaagattcatatttgccttttgtcaaaaaattcagttatataaaatatcgaacgcatgtaacatgcgctcgaaccaatatttctccaaaaattaatatcttgttaatctttcgtaacagatatttctttttttcctcaaatgcattataacacaattcttttttttacgacacccctaaattaattttttttgagcatcaatgaaaattgtttaattattctagttatttccctcattacctcatcaattccatcatttgtcataatccacgtatttttatctatagaatccacacaacacgaactcacaaagaattccgtatccggataaagcaacttgtaatacatcaacgcacgtcttgcatgacaggttttacagcagagaatcgcctttttgatatccaggtattctctgtctgttacctgccgggaataaattgcgttctcataagtgtaggttgcctgatcttctttcagaattgcttcttccggtacaccattctgcatcagaacatctttcaaaaaatcccattctgttttgtatgtcccacaataacattctttcttgtcaagaactcctgtaaatctccctgctgtgatactgtatcttccactgggcaggatctttggtgcaaacccattcctgtaaagctccgctgctttttccgccatttgaggatatccgtttcccggaacaaagatcacatccgctttttccggcttatcttctataaacatgaaatcttctatctgtttcagaaactcttcgtacattatttctatgtcctttctttaccatctgcagctaaatcccggatcaaaagatatttatctgacaggtatcccttatccagctttctgtattgcctaatcatatcactctttcgtggcagatgcactaacagattatctgttttctattttgtaacgatcactgtgctatatccactgtccctcagcctttgttccatattgaccgcatttccaagctgcatatatgctcctacctgaactttgtaaagatcattctctctcaggataaacgccggaaatccctgatctgtcagctgatacaacatcctgtctgcattttcccgatttcgaaatgctcctgtctgtacccgataatacaatggctcttccaccgtttcctcatccaatgttcccagaatggcatctgcgatgcttctggcaatctcttcgaattttttttcaaaaagctgattatccttttccgagtttataaatccggtctcgatcaaaagtgctggcatttttgtgcgccggagcactactagccccggacgttcttttacgcccagttcccgaaaccccagttctcccaatgctcccaggatattctgtgccatctgatatttaatgcctttcttatcatagaccagtacttcaactccattgtattgttccggcttagaactgctgttgcgatgaaaagaaataaaaaaatctgctccagcttcatttgcagctttcgctttttcaaaaggagtctgataaatatctgtagtcctggtataaaccacatccacgccgttctcttccaggatctttcctactgcaagggtcagtttcagattgtcatccttttccttgcgatctttataaacagcacccggatcttctccaccatgtccggcatccagaacgattttatatgccatgttctttctccttgagaatttcattcacaatatgatatgactgtatgttttttcctgtgcctgcatttcatttcatgctttattttgttttccggatctgtttactcaacatattttcacgttaattcttcttgacttttaagcgttaaagtgttatattaacacaatcagtgttgtatttttaaataatccaaaaatgcagcaacatcgtgaggaggaaaacaatatgaaaaagcgtattttaacagctgtactcgcagcagctcttgtaacaggaacctgtgctgccacagtaagcgccaaagaagaaaagacttacacaataggtatctgccagctggtccagcatgacgcactggatgccgcaactaagggttttgaggatgccatcactgaaaagatgggtgattccgtaaaatttgacgagcaaaacgcacagggtgattctaatacctgttctaccattatcaacagctttgtttcagaaggggcagacctgatccttgcaaacgcaaccgcatctcttcaggctgcagctgccggaacttccgatatcccgatccttggaacagccgttaccgaatatggtgtcgctctcggaatcgatgactttgacggaacagtaggcgggaacatttccggtacttctgatcttgctcctcttgatgagcaggccgatatgctccatgagcttttcccggatgcaaaaaatgtcggacttctctactgctcagcagagccaaactcccagtatcaggtagatacagtaaaagatgctcttgagaagcttggttatacctgtgaagattatgcattctctgattccaacgatctttcatccgttgttaccacagctgccaatgacagtgatgtaatctatgcacctacagataatactgtagcatccaatactgagatcatcaacaacatctgtcttccggcaaaggttccggtaatcgctggtgaagaaggtatctgccaggcatgtggtgttgcaacactttccatcagctactatgatcttggatacaaaaccggcgaaatggcagtcagcatccttcaggatggtaaagatatctccaaaatgccgattgaatatgcaccaaaattcacaaaagaatacaacaaagacatctgtgacgagcttggtattaaaattccggatggatatgaagcaatcgaaacagataaaacagctgaataatcggtaaaaaacctattatacactgatacagcgagaagggagttccccttctcgctgttcgtgcataaaaaagaggaggataatttaacatgcagattatgagtttaataaccgcacttccaggagctgccgcacaggggcttatctggggaatcatggcgatcggtgtgtacattacattccgcattcttgatattgcggatcttaccgttgacggaactttatgtacaggcggcgctgtttgtatcatgatgatgctcagcggacacaatgtatgggtgtccatgctggttgcaacaggagccggacttctggccggtcttgccaccggtatttttcatacctttatgggcatcccggctatccttgccggaatcctgacacagctttccctttactctgtcaacctgaagatcatgggaaaagcaaaccaggcgatcaatgttgataaatttaatcttctggtatcccttcgacgtgtcaagggtgttgctctaacacagaatacgctttttatcgtagcaattatgatcatcattctgattgcagtcctttactggttcttcggaactgaactcggatgttccctgcgtgcgaccggatgtaatccaagcatgtcccgtgcacagggtatcaacacagaccgcaataaggttctgggactaatgctttccaacggacttgttgctctttccggcgctcttctcacacagtaccagggatttgcagatatcaacatgggacgtggttccatcgttatcggtcttgctgcagtaattatcggggaagcgatcttcagccgtattttccgtaactttgcactgaagctgttaagcgttgtatttggttctattctttattatctggtacttcagattgttatctggatgggaattgatacagaccttctgaaaatgctttccgcactcgtcgtcgcattgttccttgctttcccatactggaagggcaaatactttacaaaagccaaacagggaggtaaatgatcatgctgaaactgatcgatatacataaaacatttaatccgggcaccatcaatgaaaaggttgctttaaacggcgtggatcttcatctgaacgaaggtgattttgttacagtcatcggaggaaacggtgccggaaaatccactatgctgaatgcagttgcaggtgcctggcctgtagattccggaaagatcattatcggtggaaccgatgtcacaaaactttccgaatataaaagagccgcgtatcttggccgtgtattccaggatcctatgaccggaactgctgcaactatgggaattgaagaaaatctcgctcttgccaaacgccgcggaaaatcccgccttctccgtccgggcattacccgccaggaacgggaagaataccacgaactcctgaagattctcggtcttggtcttgaggaccggctcacttccaaagtcggactcctctccggtggccagcgtcaggcattgacacttctgatggcaactttaaagaagcctcagcttcttcttctggatgagcacactgctgctcttgatccgaagactgcagccaaggttctcgagatcacagacatgatcgtaaaccgcgatcatctgacaaccatgatgatcacccataacatgcgtgatgcaatcactcacggcaatcgtctgatcatgatgtgggagggaaagatcattctggatatccagggcgaagaaaagaaaaagcttacagtcaaagatctcctggacaaattcgaagaagccagcggtgaagaattttccaacgattccgcacttctcagctaaaccacaaaaaaagaactcttataatagttagacaaacagcataacacatggaaagaacctggccggaatttcattctttatgatggattccggccttaatttctgttctaatgcccaaataacgataaactcaaagcacttccatatgtcacctctctttagctcatttcaattccacagagaattcaccactccttctgctgtatcgataaatggaagatgtcagataatcctcttccggagttgctttctcgagcgtatcacttagaacttctttcaaatcttccggataaaccacatccgcattatggaccattacttcatgaacactggtaaaaaccagatacaggtctgaacccagaagttcagaaagacgtctggctaccccgggcaaaaagattgctgccgctccattagtacgcttttctgtactcaggcaattcccggcaatccctttatttggatggtatgttccaaggatatccatgaaattatctccttcatatgtcttatcaaacagcattttttcccaatgatagattcttggtggactgataaaatatgtatttattagagcagcttcgaaaacagtatccgcatcttttccccatttctccacaaagcttttcttgatctttgcactcagaacatatccctctttttctcctgcaagataataaaccactaaagcaatatctccgattttgtgataaaccaactccttcagtatagtcctgtttttatctgcattcagaagtcgaataaaaagtctgctttttaccttctcataatctttcagatcgtccaaatcacatagcacacaattttcactgactttttttatctccctaacacaatcttgaacgatattttcaaaagaatgttcctgacagtaccttttataaagttcttctgtatgcaacccgcagactgtttttgccttttccatatgaccactctctacaaatagcctatctcccaaacagccatatttttctccatcgtttgaaaaataaatttcttcttccttcaggtccatagccgcaagaagaagctttctcaggtccgtgacaaaagtttcataacttttttccatatttaatttcctttctgtgaaacaaagcggacgaatgtcctgacaaaatcctgtgcgctctcacaacgacgcacaaaatgattctgatctgataacatgattagatatttctgtggaaagaacttccactgtagaattgcagagagcagatttctctgctgaatctgagttgcctgctgtatggacaagtataatagaagttttcagatttgtaaagaaattttcatcgacagaaaaagcaactttcgctgccttttgctgtcataccttttgtattgtttcagatttgtgtctcattccgaaatatcactaatggatttctccatgtttctccagataatccagaaatccctcacaaccttcctgtatatcttcataagttttgtcaaaatttcctgtataccaaggatccgcaatatcccgtcctgatccggcaaaagtcagaaacttataaagcttctcttccgggtcattcttcagcatcctgttaagattacgcatattagcagaatccataccaataatataatcggatttttcataatccgcccacgtaatctgcttcgctctgtgcggaaccagtggtattcccacttctctcagcttgttcactgttcctctgtgaggtggattcccaatctcctctgtacttgttgcaaaactgtcgatcaaaaactgatctgaaaggccgagcgtttttaccttgtgcgtaaaaacactctcggccatggttgatctgcagatattgccgtggcagatgaataatatttttaccattgctgacttatactcctttatgctgacttatgcggatttatgccgattttacaggcatttccggatttttgtgtttctggtgtaactctgcataactcctcatatctcttcatatctctgacatcaatagtgctaaatgtagtgctaaattgaaaacttttagcactacatatttttaacgacttccagccattttaagaacttcatctttagcgtcgtcgtatttgatatgagtatatgtattgagtgtaaccccgatatcggaatgtcccatcaggtactgcagtgtttttggattcatgccggcacgcgcctggttgctacaataggtgtgcctgcagacatgtggatgtgtcaagtataggacaaaaaaaattttatttttttctgccgaagactatctgacgcttccatcaggtagtcccagcacctttattatcttctggtaagtcattcttgtcctgctcaagttacctctgttctgaaaaaatatcgtcaaaattccattcgatttcgatttcatcctgactatgaacacggatcaccttgataatctcacgcagcttctctgtatcgaacttctgaattcccaagaaatcttttagttttattttatcagaaagttcattttgttcaagaagctttttactattctccgcatcttctatctttcgttttatttcctccagctgtacacttatctttcctgctctctgcttatacgaatcacgatctatacgaccatctttgtaatcatcatagagtttcatcttttccgaggtcaactgtcggctctgtttttgcaattctgcggtattgatctctttgtagtcgcattgcctgttggaagatactttcttttctttttccaacattgacgctgcatactgatgaacaagcccaaggatattctcctccagcggttcccgtcggatcaccagacttcgacacacaggatctccattggttcgagcatctgagcattttagcagatgctccgtttcttttagtaaagaatgcccacagttggcacatatcagtaatgccggctgttttttacgcctttccagagtaaaattggtgcgtgattccgcaacacttctcttctttttcggatgcatttcatttgctttttcaaacaatgccctgtctataattgccgtatgatgattttccaggcgaacccattctgtttcatcattcagaactgctttatgaccggtatgcatactgcaacgtgtttttccccagattctggttccaatataaatctcatcccggacaattgccgctactgtcgtaggactccagtgtttctttttaatcgtgtcaaacctctggaactgcacctgatcccttcttgataatttctgctcatcacaagtggcaatcgcctgtttgttcaattcccttgtaatatctgcaaaacttgttccttccgctgccatccgaaaaatcattttcacgacttttgcagcctccggatcaacttccagtcttccgtcttttccttttttatagccatatctggcatttaccggaaggcgtgtaccatttctcgttcttgtctgcaatgctgatgaaattttcttggacaaatccaggctatacatattgtataccagattctgcaatgctacattcattccaccagtcattccgctgcttgctgcactgtcatagctgtcattaatcgaaataaatcgaatctgtagaagtgggaaaatatattcaatataaaatccaacttccagatagtctcttccaaatctggaaaagtctttcacaactacacagccgatttctccgcttttcatgtcatcctgcaactgttgaaatccctgccttttaaaatgagtaccgctgacaccgtcatccacatattccagaatatccgactcagctacacccagctcatcaattgcaaatgattttaacagaattctctgagaagttacactgtcgctctcttttttggctctgccatctacattgtcatcttctgcagacaaacggatgtaaacagctgtttttctaagatctgtcatcttgactgcgcctccttctctttctttagtttctgtaaatctgcaaactgatcgtcatataccagcttgatctcataatcatacttaccatggataataattgaatccacaaaggcatctgccatttcttttgtcagcttacgctttgacatataagtatgtatcacatttccccagccttcttcaatgtggtaattctgggaataccgaacctgtgccgccaatacagtgtccagacggctcttgatattctcaatttcattggaatagatccgagaaaactgtatgtactcttcttctgtaatcaaacgttctgagtaatcttcatataaatccgatttacgcttactgatacggctcagttcccgtcgaagtttccccacctctttatccaaaagcaggtactgtgtctgatttttggaagctgtattcatttcctgaatcattttttctatatccaatacggttttcatatgcgtttgaatcaggcgaagaacatcgtcatccacatattcttttctgactctgtgccctttgcattgctttcctccggatttatggttagtattggctccgcagatataaaagaatgtgccatttctttctctggacaacgtcatgcggttgccacagcctccgcaccatatctttcctgtatagaaattatggtttctaatagctccattgttctgctgatgtttcttcttataagcttccgtatattcctggattttagattgtacctgttgaaacaactctctatctataatcccttcatgcgtgttctccacatgcacccattcactctctggtcgatttctctgtttatttccctggaaaacactttgctgatattttccaaatacagaatcacctgtgcaatgaacatcctgaagaactcgtttcacttcataattgttccagggttttgactccggaagcggcttttcaccggttttatagaattttctctgtaaagtcggcgataaaactccatctttattgagctgtcttgcaatatcactatagttcctgccatccatatacatagaaaatatacttttcaaatgttctgcagcttcttcatcaacgatcagctgatgatggtcttcttctgactttctgtaaccatacggttcccaggcacttgtaaattttccttttttccaaagagctttttttgcgctgctgctctttttggcaaggtctttcgaatagaactcattgataatattcttcagtggaactgtaagatccacaccctctctgaaggaatcgaaatcatctgtcacagccaggaatcttacatgaaaaaacggaaatactcgttcaatatagttgctggtttcgacataatttcttccaagtctggacaaatcttttacaataacacaattgatttttccatgcttgatatcttccatcatctgtacgaatccaggacggtcaaaatttgtacctgaatagtctgagtccttataaacttccgcaaccgaaatatcttccgtatctgctacaaagtttttcatcaattccacctgggtttctatcgtccctctttctaatgtttcttctgtttccattgaaattctggcatacaatcctgcccggaatggtcttctcacctctgtctggacggttgcactgccgactacttccggaatgtttttcctactctttcgtgccattttatacaacctcctttaccttgacctgcagattattatcatcatctattaccgtatcaactcccatagccggtaattgattcagcaatgtctgataacaatcatcaaaatcaaaagtgatctctatattctttttatcatatactctgattttcctgatcagttctaccaccactgtgcgggacagttcttcaatatcctgatatttcacaaaataatccagccaggtattggcattgtctgctttttccagctcactatccatttctttctggattgcacggatactctcttccgcatttctaagcctctttccataggctgcatgaagctctacatagtcttcttttgatacaatgccctctttcatatccgaatagagcatcatccgtaactccttacaacgttctgtctcctgttttttcttctccagcctgtcctgcagcttcttcatattgatctcctgaaatggcacagtaccaacaaattccaggactcttttcaggtgcaggatattctggatatgctgtttcagcatcaccagtacggcatcttccagatccttttccggtattctatgactagaacagcgttttgtttctttatttgcggaacatagataataagcatattttttccctgccacagtagaaacctttcttgtcataggtgcaccacaatccgcacatacagcaattccggacaacagatatacttgcttttggtcaggcgaagtacgtgtatccatgcccagaagtctctgaacaatttcaaaatcacggtcactcaccaatggctcatgatttttctcaatccggatccagtcatcttccggtttcacataagtctgcttcactttatggttcggtgtcgtcctttttccctgcacaaggtttccgatataaacctcgttttccagtatcctgcggacggtaacggaactccaaagtgcctgttctttctgccggaagcctgtttcataatgactgccactgctgattttatactcaaatggggaaagaatacccagttcatttaaacgattagcaatcgcatcctgactcattccctgcagcttcatcttaaaaatatcctgtactacactgcctgcagatggatcaatctctaatttatgcttatctgtctttgccttcctgtatccaaaagctacaaacggagtcacgcattcgccttttttcctcttaatctcaagattactcctgatcttaatagaaatgtcacggcaataagcatcattgattaaattcttaaatgggataataatttcgtctgcctgattctttcccttgagactgtcataattgtcattgatggcaataaaacgcacaccaagagccgggaataatctctcgatatacttcccagaatcaatatattcccttccaaatcgtgataaatcttttaccactacgcagtctacaatcccacgccggatatcttccagcattgcctggaatgctgggcgctcaaaattagagcctgagtagccatcatcaactcggactgaaacaacttctatatcttttttgtctttcaggaaatccagaatcaaagctttctggttagaaatgctgttactttccagttttgctgaactggaaatatcgccatcttctttagataatctgacatagatggcggcatgatagattttattgatattctgatacatatcttacctccttttattacgtcagaaaatccatgtaataaaagggggctgcataatctgtccttaccgacattctaacacagtcccctcaatcttgccagtactttttcagacactcagaagcatattctcaaatgcctgctccatagatataccgttattggcaaatctgacttttactttcatattgccgatccggaccaaatatggatttcctactttattcagaaaaatatctctccgttcctgaagcgatttatttctgtctgcttttatcatccgtagatcagtcatttcattgatatctacatcactgaaatcctgctccagatagtttctatattcctctgccgtcatgcccttctccttccattcccatctgaatctgtactgctttcagtacccgatccaggctccacttgttcactcttccgcatttctcaataatacatttcgtagaaatgctcataacctgttcagccagtgccaggcttccttttcggattcccgtcatatcatatttgctgataaatacatgtgttggcaaataccgcttcttatatattcttgacgtcagcggaactactgtaatgactgaactgtatgtattagctttgttgttacttactacgatcaccggtcttactccaccctgaaccgaagttgtcgggaacataccgagatccgcccataagatatctcctcttcgaatcgtcacttgtcatctctccaatccttttttatttgtaaagcattcatagcgctatattagctccacaggaatacggcagagttcctttccaagacggaaagctctgccgcataacctctatagccaatttgattattaaacagtgctcgctcgattctatttatcctcgataccccgaatcgttactcccgcatatgcaggaagggaataataacctgcccggatgcatactccggaccacaacccggaaactctcgtttccaggctccagcagttcataggtttaccagttacagacttctcaggatctgcaagtgtatcgcatctcatacatatcatcgcatcaccagcctgccagctggcttcggtcagtgctttttcgcagcattacggactgaactaaaaatctttgttttgtcttataatcctatagcggcatcttcctcgtgctctttgcatgaaatgtcacgtcagttattattggatattcagttatcatggttcattttaggaagtcctttaacttcctctaattactaaagtcaaatgactttggcagatgcaaaagattttgaaaaattttttaaaaaaatttattcatatacatttcacgcatcttattaagagtggatttcaacttgtatgacagcatctgtctggaaatccccataatctccgccatctgtgtctgtgtcttgttttcaaagaaaataccataaataatcatgcgttcctctgagttcagttgattgatcactgtgtgaatatcctgctgttccatttttgtcagtacacagtgctccacatcacagttcagatctggaaaatcctcaatcatgaagccttctccatcaatggactgaccgctgtaaggtacttctctcagcatcttatccacaacctcacccagttcattcttaatctcaactttttttgccttgctgcttctgtaaaaattattcatcgcatacgcaacttcttttgtaatctcgatcatttctccatcaatatttgcgtaatactttccttcgtaaaaatatgggtgttcaatatacatatccgttcctcctgaatttgaaatcttgttgctcgtttcaaattcggaaggaggacctttgtttaggatcatgcctgctccgccttcatcctgccgggacacatccgcagttattggctgataaattcaggcacgaaaaaaagccccagtagtttttcttaactactgaggcttctgtctctttcttgtattcagttatctatgccctctttcatcagcataatcattgtatcaggataaagttcacaaagtatccgcaatacgttcccataagttcatgtcataacagaaatcgtacatatttcgtaagcgcttagtttttgggtaactagatattcgccggttcctaactcataatgatagcagatagatttttactccacttctttgataggaggtagaaattcactacatttggaggtttcattatgagtgataaacgagccccaaggcgttccttggatgattggatggaactggtgactgaatgcaggcaaagtggattaaccgatgctgcatggtgtgaagcacaaggtatttctccaagttgcttctataatgctgtttcccgtctacgcaaaaaagcctgccagataccagatccgattggcagagccagcactcttgatcttacatcccacaaacaggatgtagttcagattgctatagagccggaaacttctccggcagaactgtttcaagatgaaagaagcagttctatgtaccttgacaattcacatacgattgagattgaagcaaaaggattaacaatccgtatgagcaatactgttcagcctatgcttttgaaaattttaatggatgcattaaaggagccattatgttagcggacatttccaatgtcgatgcgatctatatcgtttgtggcagaacagatatgcgtaaatctatcgatggattatgcgcaattattcaggagcaattctctatggaaatcgaccattcgctctatctattctgtggacgcaaatgcgacaggattaaagctatcttaaaagagcctgacggaattgttatgatctacaaaagactcaccgcccaaggctcttaccggtggccccgggataaatcagaagtccggaatctcacttggagagagttcgactggctgatgtcaggcatcgatatcgagcagccaaaagctattaaaaccacttaaactgtacggcaaaaaatgcacataaaagcactggatttccttgaaaattcagcgcttttcaagcctcttatcgccccgttttcctaggagttttccatgatttctggtataatagaagtatcaaaaaccgggagggaaacgcagtggcagacagttctaaaggccttcaactccgtgagttgaaagacatgatcaacgatctgaaaaaaatgataaaaacacttcaggcaactgtagatgccgctaacaaacgggaagaggctcttactcaggaacgggataatttaaaggaagaagtggatctgcttcgcaaaaagcttttcggttcttccagtgaaaaacgttccatggatgttccgggacaattgaatttatttaatgaagccgaactggaacagaatccaactattgcagaaccagaagcgttggaaagtcttttgcctgagaaagagacaaaaaagcggaaatcccgtgcaactaacgcagaacggttcaaagggattccagtagtcaaaaaatatctggatcttccggatgcagaaaaagtctgccctgtttgcaacgctcctctggtaaaaatcggtgaagaattcgtacgccgcgaactttccttcgtaccggcaaagttaaaagtgatcgaaatatacagcttaaattatatttgcccggaatgtaataacgatgacgttactgttatcaaaaagggaaaagacggccatgcacatatgcttcacggtatggctgcggcagatactatcgcctgggtcatgtatcagaagttttgtaacagtcttccttatacccggcaggaaaaagactgggcacagtacggtgttgctatcacaagagcaacgatggcaaactgggtaatccgtaatacattggattatttcaccccgatgtatgattacttccaccggcaactcttaaaaagggaattcgcaatggcagatgaaacaccactccaggtattacacgaatccggcaggcgtgcacagaccaaatcttacatgtggttattccgcagcggggaagatggcgaattcccaatcatcctttataaatatgcagaaacccgtaccgggaataacgcagtagaattccttgagggattcaaaggatatctgatgtgtgatggttacagtggttacaacaaagttcctgatgccaaacggacagcctgctgggcacacatccgcagatatctgacagatgcgattccgaaaggaaagcaactggattatacacagccatctgttcaaggcatgatgtatatcaaccagctttttcatttggaagatgtcattaaagcgaagtactcatccttcgatgctatcaagaaagctcgtcttgagaaagaaaagccgatagtagaaggctttttgtcgtggcttgataaacagaatccagtccgtggatcaaggatggataaggcagttacctatattcagaatcgccgatcctatcttatgacctatttggaagatggtcgctgcagtttttctaataatctcagtgaaaacgctattcgtccgtttacagtaggccggaaaaactggctgttctgtgatactccaaacggcgcccaggccagtgctatcgtctacacaatggtagaaatggcgaaagcaaattgaataatccggggtgaaatccatcacctgtccggcgtatggaaatcaatattccgttttttacggaatcacgattccggcaaaaagggaatcgcatttttcctaaaaccttataatgatgttatgcactttatagtgtaaattcattatgaggaggtcacgattatgaccaaatatcgagaaatcatccggcttactggattgggattctcacaacgcaacatcatggcaagctgtggtgtttcacaaaaaactgtcgtcaaagttcaaaaacgtgccagagaactaaatatctcttggcctcttgatgaatcaatgaccgacacagagcttcaaaggctcatgttctctaaagagagcaaggtatctgccaacaagcggatgccggattatgattacatccgtaaggaactgcttcgcaacggcgtaagcaaaaaactcctatggacggaatacatggaggattgccgtgccaatggtgaagaaccactcatgtattcacagttctgctatcacatccaacaggatgagcagaagcatcgtgctaccatgcatatcaaccgtaaacccggtgagcaggttgaagttgactgggcaggtgatcctgcaacagtcattgatcctgataccggcgaaatcatcaaagcatacatatttgtcggtgtaatgacttacagccagtatgtatacgtggaagcatttctggacatgaaacagaaatcatggatcaatgcacatgtccatatgtacgaatattttggtggtgtcgccagaatcctcgtaccggataactgcaaaactgcagttgttcataatggcggatggaaagaccagcagatcaatgagacctatcaggaactggctgagcattatggcactgctattattccggcgcgtgtcagggctcccaaggataagccgaatgctgaagggacggtaggaaatatctctacctggattacagcagcacttcgggatgaacagttcttctcccttgccgaattaaatcgtgcaatcagagacaagcttgaactgttcaaccaaaggctctttcaaaagaaagagggtagtcggcgaagtttatttcttgaggaagaaaaaccattgctggcaccattaccttctacccgttttgaactgagcgactggaagacagccaccgtccagttcaattatcacatatctgtggatggaatgctatactcagttccttatgaatacatcaaaaagaaagtggatgtaaaggtaacagataccactattgaaattttctacaaccataaccgcattgcttcccaccgtcgtctgaagggacgccctgggcagtacagcacggtcatggaacatatgccggaagaccaccagaaatatctggaatggaacggcgaccggttccgcaaatgggctgagcggattggcataaatacgtacactgtggtcaatgcaatactgacctccaaacgtgtggaacaacagacttaccgaagttgtatggggcttctgaagcttgctgagaaatactccgatgcattgcttgaagcagcctgtaaaaaggcgttatcctatacatcttcgcccagctacaagagtattaaaaacatccttgtaactggttctgtaaaactggaatcagaaactactgaatccaagaccacacataaagcacacggcatcacaagaggtgccgactactatcggaggtaatcacacatgacaaatcagagtacaatagataaacttattgaaatgcgtcttacaacaatggcagatgcattccgtaaccagcttgacgatcctaaattcaaggaagttccttttgaagaccgctttggaatgctggtcgatatcgaatacagcaaccgcaagaataaccgccagaagcgtcttatccgcaatgccggattcgatcagccggaagcaagtatcatggatatcaactacacttccggacgcaagcttaacaaggatctcattaaccggcttgcaacttgcgaatatatatctgaacaccgaaatctttttatcatcggcgctacaggctgtggtaaaacatacatggcctgtgcctttggcatggaggcttgtaagcagtatttcaataccaagtatgtccgactccctgatctgcttattgatctggagacagcacggacagatggtaactacaaaaaagtcatggcgaagtatgccaatccagttgttctgatcctggatgagtggcttctattgaaaccaacgaattcagaacaaagggacatcttcgaactgcttcataggagacgtaagaaatcttcaacgattttctgttcccagtatgcattcgaggaatggtatgagcagctcggcggtggtgacagtcctctggcagatgcaatcattgaccgtattgcccacgacagctatcgaataaatatcacaagcattgatgctgaacatgatagatcaatgcgtgaggtatatggtttggataaagaactgcgcgagtaaactcgcataattacataggtgatttccacttccggacatctgattcccaaatttccggaagtgcgatttcatcgcacaagaatattcacaaatggagtaaacgtctatcactatctaacctatcttctggaaaaactcccgaatgataggatgaacgatgaagagttagataggcttgccccatggaacgaagaagccaaagctgaaatcgaacgtcgtgcaaacgactcaaatcaataatcaatcatatgtgaattatcaaggtgctccggttgcagaaatgtggccggggatttttgtacccatgtctaaaatttaagcgcttaccatatttcggtgttaaaagttcaccctgctattcttttacttcttttccatctatatagagttcaaatatatcaggattattgacaacatcataatcctttccatattctacaggtctgtattcgactgtcatcaccgacgctccgtcttcaatatcctctttccatagatatatattcataccaaggctcgtcgcatatcctctgtccgtagaaaactttatcgaataaaagaacttttctttaatactaatcctatccgataccagtcttttccctttcttgcaagcagtaatcccagcccaaacttctggtacataatctgcacaatcagagatacttcataaattcgttactatttttcaattataatactctgataaaaatatcgaggacctcattttcagaggccctcttaatacaaactttccatgaacatctcgagcttaaatccagaagcagttatcctgatatgtacattaacagatcctgtgtataatattgttaacttcctgatgaattaactctcgactgtacgagaaccttataataatggatttgtgactgttttataagttaactctcgagagttaattaattctcgtgtcgttaacgatataacacgcacaaaccgcataaataagccatttatttggaacgagagttaattttacaggaagttaagaaatatactataaatgagcaaatttgaaaaattgcacaaaattatcctgctaacttcataaatgccttaaaatcattacttccttttgcaagttggaagagatactgatacttttctgtctgaataatgcttccaatccggtggtagcctttttcaaaagaacagaattcaccagtccctgtcacacacataaaatgtgccattgacataagaagccagtatcttcggactccctgtgcagaacgtatctgatagctgtccagtgccagtttattcttacactggcgaaaaaatacctctatcggtcaccggcagacataataagacagtgtttcgtccaatgataatgaaacgtctgtactgagaaaagcacgcagtgcttttggatttccaaatgctttttccggataacttaaaagaactacggcattttcaataccgttgagttttccctcataacgatacacgtaatatttttgttttttcactgtcacaaggcgaaaattggaacgtgtggacgttaaaaaagcagcaaactcattaagtttctttttgaatccaaatggataaagcatccggtttgttttcagtgcacctatggtatgaaatcctccggctgcgaaagtgttgattattttttcagaagtataccagcaggaaagcataacagcaactgcctggtgtccgtaatcctgtttcccctttaaatgggattggtgaaagtacgcgtcttcaattggatgcagagcctgtgacgaaggctttgtttttgaagctgtcgtatcatctacaatacagaaaaaaggctttccggtgcgagctgcttctgaataaataatctctataacagaacgttttaacgtatctgaaagtgaggaatcatcccattttcctgaattaaggaaatgtgcgatcgtagtcctgtgacaggaactgtttttagcaaagtccgtggttttcccatggtatcctaaaagaaatatgctgatcagaatgctcataagatgatttatcactcgattggaataaaatttgtataagtttaatttcttaagctggttgtatatgaatgtagaatgatgcatagtatttgcgagagacaccttctttcgtaaatgttgcaaatgtttgtttaggtactttcattatacaacacacggaatcaaggtgtctctcttttatgcaaaatcacgaacttgctcatttatagttaattatctgcctacaattctatcaaaaaaagtaaaaaatacttaaattcggaacagattacattaatggctcaatatatcctagctttattgctttgttataagcttcaactgtattagatacttcaagtttatcataaatattttgaatatggttatataatgtacgttcacttataaaaagattctttgctattttcttctttatatcccccttacaaattgctcgtaatatttcaatttccctctctgttaatacctcaatatctggaattttattataatatgttttattacaaagaactctctttaatctttctactaattcctccatagaaacagacttatttataaaatccgcagctcctttgtcaaatgccatctttttgtatataggcatatcatacgaagaaagtataactacttttgaatctggattaattgataatatatctgccaatatttcaaatccattcttttcagaactattctttaaatttatgtccaatagaataatatcaaattctttttctcgaaacgtacggaaaaaatcattctccctttcaacatagtagcaaagtgatacaaattgactctctatcagtaatttctttaaactctctccaaataatctatgatcatcaaatagtaaaattttcactaatctacctccagctcgacactagaccataaaatgccatttgaataattatatgtcaatttcccattgtttgcctctacaagcaccctcaaaagtagcacaccacctttagacttgaaaatattttcataatctattgcactcgccccatcactcttgcagttaattattaacaccatattttcgtccaattttatttcgtatttgatataagtcgcattggaatgcttaaaaatattgttaatcaattccttactaatctgtaacagcatttctaaatgcactttattttttagatatttttctgctttttcatttatatcaatttttaattgaactttcttatttggatatatggcttgtatagaatttaacatattttctaaattaatataggcaccatattccagaaaaatatttgccgaataaaaattcatcattttccttgcacgatcttccagatttaataaaacctttttcgatagcacaatatccggttgttctaatgctaataaattgtaagatgctctgatatcctggacaatatcatcgtgaagtattcttgaaaaattctctctttcagtatttatatactttgttaagaaaaaaaaggaacttatttctctataaaattcttgcctatcctctatatgtatcatagttaatatttcaaacaatagcataaaaacctggaaaatcatattaaggcaaaatgaatcccaatcaaaaatataagatatatatactactagtggtatccataaggttaaaatatattttgacttctttgcagaagtcggaagtatatgtacatatttgaaatttatccatttatacttaacaaaaatatctaccgccatgcccaatactatcataaacgaagaaaaaaggacaaaccgattaatgtaaaaaagcaatcccaaaaaataagaaataagaacagttatttcttccttatatcttttcctggctaataaattccttgccttatacaataaaaataatacaaatgcgatttcaaaaattataatacctgttctatgtatcatggaactacagaataatataggaactgtataatcaatactatccactatatctgtttttttttgtgatgtcataatatatacatataatgcactaataaaacaaactaacaatatcatagataatgcatttatctctacagcatcatttgtaatcaaattaaatttataaaaaaaactccacataacaattatagctatatggagcagaatatatatgctgtacttactcttcatactctttttcacccacatcactgaaacatcatttaccgtatctagtagtatgccattacaattctctctttagtggccattcgcagaacaaatacactaacacacaaacttattacatactttattataacagttaaaataaaattattgctccaggaataaaacatactctcaataattaaaataaaaaaataaaatactgatatacgcaaagaaattcccttatatttattcatatctcttataaccaaaataactgcattaataattatactgcttaataaggtaaatgtaaagaaatcaagtatttgggcaacatcaggtgatcctattttgtatatagtaatacctaacagtggcataagaagtaagagagttgatatccacaaagaaactgtatgattaataaggatagattgaagcctagtcccatttgcaatcaaccactctattcttcttgtgattttttccatttgtagtaaatctttacttaattcacaggcaaatataatatataaaaaaatataccccttccaaagcatatcaatataagtatatgagccaattattttttcctgccctttactaaataaggttaatataccaaaaataattgctactagactcataaaaacaaaattacctgttaaaatttttttcacatgaatcctaataatagtcaaatccattgtccaacactccttacaacactttcattgtctaatttagaaatctttctgaaagaaataacagctaaaattgtcgcaccaattatattcagaataataataaaaatatacatactaatatttaaacctgatacaaattcaacaatttcattcgcacacatagcactaatataaatcagaaaaaaatttccaaaaaagaccatatttttaaataacttatatttttctacagaaaatgtaattgtattgaaaaatagaacttcagtgtaactcattattactgtcgatataaaaaaggctataataccaaaaaatgaaattttaaaatctatgagataataacctaatacaaatataataaaaggaattataattgatgcttttaaaatttgtattgtgtaggccttaataataaactttaaatcaatccctgatgctaaaaaaaactccatccgtttactcattttatctttcactgtcaaatctattattatagaatttgcctgaagaagagtacatcctaaaagaactacaaaaaaaactaaaataagataatctgttccttttgaataaaattgatcctgttgaaatacaaccaacatcagtgtcccaagcactcctactcctaacatattaaaaattgtagatttactcttaaatataatataaaaaacagcttttttaatattattcataatctccaccttcttttataaataactcttccagtgttgtcccttttatgttatctatatcctcattgaaaacaaccttaccattttcaatcatagtgacataatctgcacttttctcaatttcacttaaatcatgagatgtaatcaatattgtttttccttcttcctttagtttctggataatctttcttatttcaacacgagacaacggatctacccctgatgttggctcatcaaggtaaataatctcactgttgattagtataacgattagaattgacaattttcttttcattccttttgaatacgtactaacacgtttcaataaatgttctgtaatatttaatgaatcactatatttcttatagtcctttacgtagtatccaaaatacaacccaaagattttcaagttctccaaacctgttttatcctcatataaataatcattctcaagcaacattgcatgtttacccgatacagatatttttccttcatctggttcgtataatccggtgagtaaacgcaatagtgtagtttttcctgctccatttgctcctatcaaggcatggacagaatttttcttgacagtaaaattaaaattttgaaataatttcttaccatcaaacgcttttgaaagattgtaaatagaaataatatttgtcattatattaacagcctcctaaactcatttggtatatattgggaataccatgcacaattttcaaagcctttttctttagcagctactaacccacgtattatgcaataactacaaaagtactttttttcacaccctgagcattctttacttgtataatctggagcttgtataccacgaatcatattcattaattgataattatttgaaaacaactgtccgatatcctctttaaatacatttcccaaagatttaatcactgtctggttatccattgcacaaaatttgatttctccctctggcgttattgaaggattcgatgtaaatgctccacaattctttgcgttgctatttccgtctttaattttatataaaaacccttttccatatcgggtattaatgttttctattactttaccaaccctttcatgttgttctaatgtctttaaaagcaaattatttttatcctctaaatcagctcttcccataggagtaattgctgatataccataagtttcgatacctgcttcttttacccatcctgcaatattttcaatttggtcaatgttttgcggtgttaccattgtaacaactctcatcagtattcctgaattattaattctcataattgtgtctttaacacggtgagtaatattgggtatttgtgttcccataaaccaatttatataatcatcattatctccgtgtaaatcgatttgtacaactgtctgctccttatgttctgcaatcagtgcgaacaattctttattccaaaataaaccattcgatagtatacttactaatgaatagtcaagattatacgcttcattcaggatttctaaaaacctcggatgacacgtgacttctccacctgtaaattctactactcttgtccctgctttacgtgcatccttaagtaacttctttatttcctctgtattatctttaaatgcattcgttgcacaatattctccataacagtgcaaacactttgcattacacctatgtgtaatttctacagaaatagctgatggatactgtgtttttccatttccaagtattggtatttctattggatttgttttttttaaatactccacagaaattcctggatttttctccaattcattcaaaaaattatttaatttatacttagcctgttctttcttctctaaatgacaactgatcatcatgtcaactagatcatcaaatgtttttgtcccatttaggttacgtataatttctaaagcatctttgttaatgcgatacaatgattcacccatcttttcataacggttatttattacaagaatataagaatctctttgtctttctattgcttttacgttaattaatctcagatacataccttctccttattgttgtttaacctacaatataatcaatcttatttctattatcatctgtaattattttatagaaagaacaggaagtgagaattattactatctagcggtaaaatctcacttccagtcttctgcttgttatgatttattactcagaaaaatccaacaaagcctgctgcacccgctgcagcaattgcggatggtccacagaacatacaccctgtacatcctgcacataatttacatccgtttcccattggtgaaatactaggattcatggcatttcctccttatgtatattctcgactttgttatcgagtgactaaattatatattagctttacgacatttacatgagtaattactgcaatgttcttagattatgtcgattatgccattaagcttaatcattaaaagctttatttactactataaatataatattcctatttccatttattcccctctaaattcaagatcatatctttggaatgcgatttcgaaatctttacgtcttcttcttgcaacatttatttcttatccatttatatttattgttccttttttataagaatcaacattcattaaatttacaatgccgctcttactaattcttataaataaatttctatccaacatgtcttccagttgcacgagtgaacaatctcttcgcattgttttgcttcctaatttctattcacatcaattctgagaaagcactttttctttgtgttccaatttcttaaaaagaagctgccagaaaatcatatcttctggcagcttctttgaaattcagtatttgttaatgtgcaacactcatgctctcatcaatccatttctgtacgacatcgacgccaatcttaacggctttagcaatcttgtcagcaggtaaacccatctctgcaagggcaatcgttgtctcttttgctttttgcatttcaccgctttcaataccttcactgtaaatctgttccatctcacggcacatgaattccacccctttctgtgtttccttcaattcgtatactctgtcagcaagtatcttactgtgcatatcttctgcattcttacagtgaagatcatgcatcagtctgcctaattctgtatcctcttgtttcttagaatttacatagataatatgagcttcatccttaaaattctcactgacttcttcgattttcctgtctatatgataaatcggaagtccgtatccaagtgcatcgtctctggtgataaaaatcacgtagctttccggaaggtcatcaaaatcctgtcctggatttaatgtgttcatatccatcagaccactatgataccttgctcttttgggagatgccccttcgttgtcctgttggatttctacatccatctgcttgccttcagaatctctggcaacacagtccagaatagctgaacgcccctgcaaattcttatagtctttctgcagaacttgatcaatcactttcagatcctttttattcataattacctgcagaacatattctgtacattcccgtttcttgaatacattccgcataaacacatcgctcatgatggtaaggtcttttaagatacccttgtatctttcgtaacgtgtttccaattcttctgttttcacgatttcttctttcgccacgtccattctcgcctccattctttgctatgtcaggataggttcctaaatgtctcctatcccaatttcatcttaacatcaaaatcagcttttcacaagccactattttatcctacaccacttgaaaacaataatttccaatcagtttcatccaactattatatttattcttttcacacacctttcggcaaatttcattttccatcaatacacagaacatcttatcataatcaaatgcccaaacagcaccattcacatggttttccactgctttctgatctatgcttttcaagcgtgtgaccattttctcaatttctccatttcccaagttaccgatatttttgcagataaaccgaaagaaattcaacgttgcatattcgtcatgccaatggaactcttctggattgtttttaattttactgactcgctgctgttctttgattatctgagcagctacacctttcattgaatcttcgtatctcatattattcacctactcttcctcaacgcccagtgacggtttaaatcttttatcctttgcctgcggtaccacgatctcataaaaataaaatcctaaatacccaagtgcctgcttcttcattttataaaaagaagtcctgcctattcctaactcctgttgtacttccacatctgtcttattataatgactgcaaaaacaggaatgaaggatttcactgagcatcacaccattcggtgcatagaacttcaccaaagtcattccccgatagatcatgtccgacaatccataaataatcatcagattattcatctcccggtgcatctttggcacattcagctggttgttataaatgctcagataactcaatgcatatgccatatcttcattgattttctcctggcattccatatccagttcttctaacacaatctgattttccaaaatcaatttctgatagcttgtcatcaattctttaatatcagtataatgtctttcgattgtaacttccagataatcctgtgcatgacttgccatctggaaggtaatttctttcattgatttaattgcataatctctgtctgtcatcagtttcaaaatctccttatcatcatcacactaactggcggtctttcagaccagttcgctttccccatgattttgatgggaagcaattacttactacaacttgcagaagcggatatccaaaaggcattgtgggagctgcctttgctgaccggaatccatcttcttatgtaaaacctgcaggaatataaagggaaagtgactatccctgccggttaataatccaaataatatcgtctataccaatctctccttatgctgtttttctctccataaaccatttatccacttcgtaaaacaagtggctttcctgcccttgtatcatacaggtgtacatcattcctacaccgcctgcctttctgctggcgcatcgctcgattttcaaaattctgtcaatgctatactttcttccatcctcccatgtaaaaaatatgggaaccagctgtccgtctttccgaaactctgccactacatctacatatactttgttcatgccgacacctcactataaaatctcaattgctcttggcgatgccgggattctgcggatatatccatttaactccaactgcttgattctggaaaatgctgatgatgttgatttcaccccgatcaattttccaaattcccgtactgtcggcggatatccatgctccttcgtataatccaaaaaacactgataactttctttctgttttctggttaatgtttttttcaaatctatccctccaattacccatgaaaataactgtgtggatggatcgtgtgcgtaccagcgtctaagtgggataagactttatcttgatacattgccgctcgctgtatactgaaataaccaaaccgtcgtctgatctcatctacagtacgatccagcttctctaacttttcctttttctcctgatttccaaataaatccaactgcacgggaatatcatctaacacaagatccgcagctcggattcccaggcttctaatgggatgttcccatttataattatctttaaatagctgaaatgctgcagttacaatctcgtttgtaatattcgttggctgtcgtaaatgtatctgtctggaaaaactatacaatccattatctcgaactgtaatttctactgttttgcatttaaatccatgtttccgcaatcgtgcagctacactttctgccaatgctatttgaatgatccagacatccagatcattttccagatctctcggtgttgtagtgctattacctatcaactttactggtgcttcatatccttccttgcaaaccggatcttcatcccaaccatttgcgaaagcccataatacatttcctatttttcccaaatggctctctaacaacttttcgtctgattccgcaagttgcccaattgtccggattccaagtttttgcaatttcttatttgtctgtcttccgacataaagcaaatctgtcgctggaagctgccatatcctgtctttataattttctcgattaaactctgtgattgcatccggctttttataatctgaaccaagtttcgcataaatcttattccaggaaattccaatacttaccgttacacccagttcgtatttaatccgatggctgatttctcttgcaatcgtcattccgcttcctttcagatttctgctgtccgatacatccagccaggcttcatcaattccatatggctcgatcttgtccgtatactccgaatagatttctcttgccatctgtgaaaatctcaaatacaaatccatccgtggtggtacaaatatgatttccggacaaatctgttttgcctgccataatgccattccggtctttacacctttttgctttgcaatataatttgctgtcagcacaatcccatgtctggcttccggatcgccaccgactgccagcggcattccggtaaattccggatgatgcagcatttccacactggcataaaaacagttcatatcactatgcaggatcacacgctcactcaaacttttcacctcccagctgttttcttcaacatgatgtcttatcaatttttgtatgtttagtatatatcgacattccggagatagtcaagtaacatcttggttgtattttctccattttggagattattgttgattttatttctaacatacggtataatgcatatagaaaattcaaatagaaatgaggcgaacaaatgcgtgatttcggggaaatattagcagaaaatagaaaaaagaaaggatactctcaatcagatctggtagacctgctttctcaggaaggtattcaggtcactacaaaagcaatctccaaatgggagaccaatgcacgagaaccagctttacatgttttcctgacactttgccagttacttgatatcgaagatatatatgaatccttctttggagaaaacccatataacattatgagtggattgaatgaagaaggcagaaataaattgattgaatttgctgatattttgaaagcttctaaaaagttttctccactgtctgcaaaaattatcccattccatcatcctgtagaaattacatgggaaccagtttctgctggtactggaaattacctggaggattctgtaaaagaaacctatgatgtaggacaccttgctcctgagcagactgactttggtgtacggatttccggtgacagtatggagccagtttatcatacagatgatgttgcatggattcagaaaaaagattctcttgctaatggtgaaattggaatcttctatctcaacggcaatatttacatcaaggaattacacgatgagccagatggtgtttatctgatctctttaaatcaaaaatatcgtcctatccaggttttggaatctgactcttttaaagtttttggaaaagtaatcgggaaatgcaaaggtgcagaaattccgggatttcattagatttcaacagcaggttcatgatcctgctgataacaataagcaaaggaagtgattgaatggcaatcaataatacattaaaagatattcgtgaagaacggaatctcattcaagcagatttggctgaagccataggttcctgcagccagactattggccgcatcgaacgtggagaacgtaatccctctcttgagattgcaatccggctggcacattacctgaaagtgcctgtagaagatatttttcaagttgaagactaaatcacaacagccagaaaaccgaggagtaaaatccccggttttccttttgctcaaaatcagtgtaatccttttacgaagtccactgcgtttttcatatcttcttcatccggatggcctttagctatacctccaaccagtttaaatggtccaaatgtgtcataccctttacatccaaattttccaaccacactggcatgttttttatccaaaatctgctctatggatttataattcgcacttccaccataagtacagatcagaaatatctttttgtcgtccggtagattcttctctgcaaattccaatatcgactgatgaaactttgaaaaatagattcctgatgcaaatccaatcatatcataactgctcaaatctgcatctggctgttttacagcatcaatcaaatcgacctgacactcttctgctatgccttttactaatttttctgtatttccatgatgcacagatgcatatacgattgcttttctcatttattttcctttctgcctgctccatcaatcaggtcataactcatatctaaaaagtccagtacctttgcttcactgaccgaaccatccagtaaaatcgtaatccaatgctgcttattcatatggtgtccaggtaaaaagccataagtctgaataatcatatttgtcatgtccggattacactttacatccatgatatcaaccagctcttttccttctaatcccagtttcgatttttcaactgtcatgatcactgcataccattttccatttttatgtcggagtactgcactgtccggtagtttactccatagatattccggaagtgtgccatactgtttctgcacatattcaaatatttcttctttcttcacaatccattcaactcctgattcttctgatatcctgtccataatcttaccacatttttgttccctatactacctgtcaaattcttttgcattttcccggttctcctgactttaactaatagagggataaaacagcaaggacaggaagtgaggatacacttccgggaaatcccaatttagggtaccctgccctaaattgaaaaacgttgaaagcaacgatactactgtcctctcagaaaggagaacccaccaatggctgaaagaaagagaaacaaagaaatccatttttatgtcaccgaagaagaaaggaagcttatacgcaggaagatgatagaatcaaaaaccaaaaacatgggagcttatctgcgtaagatggcaatcgacggttacatcgtcaacaccgataccaccccactgaagaaacagtatgaggaaatgcacaagattggtgtaaatatcaaccagattgcaaaaaaggtaaataccaccggagatctatatccagaagaaatgcaagaattgaaagagatggtgaaagaattatggcgtatcttaaaatcttccccattaaggtaactgacaagaaagctctggactatattacaaatccagataagacagatgaaaaactgttagtttccagttttggctgttccccggaaactgcagatcttgaattttctatgacaagagaaatggcaaaaaagaatggaatggataaaggcgataacctggcatttcatctgatccaatcatttaaacctggagaagttgatgccgaaaatgcccatcgcttaggtcaacaatttgctgacgaagtgctgaaaggaaaatatgagtacgtgatcagcacacacgttgacaaaaatcatattcacaatcatatcatcttcaacgctgcaagctttgttgatcatcacaagtatgtttccaataagcggagctaccataaactctgcagaatcagtaatcgtatctgccatgaaaatggacttgccaccagcatgccaaccggagaaaaaggtacaagctataaagagaacatggaatatcatcgtggcaccagttggaaagccaagctacgtgtcgcagttgataaatcaatctggacttccatcaactatgaggaatttctgcaaaagatgcagttagccggatatgaagtccggcagggaaagcacctgtccttccgtgcaccggagcagaagaacttcacttatatgaaatctctcggaagctattattccgaagaaaatgttcgcatccgtctggctaaaaatcgtagcaaagtaaaaactccaagacatctgtccagagaagctcgcttgtatatcaatatctccacttatgtcacaactggaaatcgagagggatttgaacgatgggcaaagctcaataatctaaaagaggcagcccgcaccttcaactatctttccgaaaataacttgctgaattatgacgatttcaggcagcatgtatctgacattgaagcttctgtgaaagttgccgaccaaagaatagcacaaatcaacagtgagctgagcacgcagaaagtcattcagaaacactgcaattcttaccggctttgtcgtaaagtaattgaagattgtaaatctgctaaaaatccaaaagcataccgcaccaaacatcaggcagaataccagctccacgattcactaaaaaaagagcttcaggatctcggtatcaccaaaatcccaagctctaataaaatccagaagcggattgaaaatcttgaatctgaacaggatgctactgtccgggaaaaacaggaattgcagaaaaagcagaaaaccctagagatcattcagcaaaatttcactgtactgctcgatgctccagagatcagttcagacttacttccggcaaaaaaggaacctgtttctgtcacaagagaaaaataagattgcactggcaactcactcattttcttccaaatcttcccaaggtttcaaatccttttcctcccaggtgacaccatacggtgcacctccggaggtataaccagcaatacagaaaaatcggtcatcttgcaagatctcttctttggtcagattatctcttgcttcttttttccgttttgctcgcctctgtttcctcttttgtttcgcaacagctgctttttcttccggcgttttcctatgtccttttgccataagtgtttctagtgtaattccactctgaatgtcttttagtatacgagtttcataccctgtttcacgtttctcaacaattctatagtatgatgaacataaaagattcggtgaatcaacattgtactaatactttttttcaaccgaagttttcaatttttcaaaagcttcttcactgattacatgttctatccgacaggcatctctttctgcagtttcccgatcaaccccgacagctacaagctgctccgtaaagaactgatggcgttcataaattttctcggcaacctcccgcccggcattagtcagattgaggtatccatcttcatcgacagtcaggaaaccgccattctttaacacacctactgcatggctgatgctcggtttactgaatcccatgtgccgggcaagatcaatggatcggaccataccctgcttcttttgaagaatcagcacagcctccagataatcctccccggacgcatgaatcttcatcggttcctcctttatgcaaggctccagccggaagcctttttacggatatttacaaaatcctgataaatcccggcttttgccataagctcgtcatgggttccctgttcgctgatccgtccatcagagatcaccaaaatctgatctgcctgacggatggtattcaggcgatgtgcaatcacaagtaatgttttaccctttaccagctcattgattgcctcctggatatagctttcattatcggtatcaacacttgcagtcgcttcatccagaatgacaatcggtgcgtccttcaaaatgcatcgggcgatagagattctttgcttttcgccgccggacagagtagcgccgccttcaccgatgactgtctggaatccatctggcagcgccatgataaaatcatagcagcgggctttttttgcagcctcatagacttcttcctcggtagcgtccggtttacccatgctgatattgttgtaaatggtatcctggaacaagtacaccctctggaaaaccatgctgatctgttccatcagttcggcgagaggtacatcccgaatatctgtaccacggattgtcactttgccggatttcacatcccacagccgcgccagaaggttcgcaatcgtggatttgccaccgccagacggtcccacaagtgcggtcatggtattcttctgcatagagaagctgatgttgtgcaggacttccttgtcctgataggcgaagcccacatcgctaaattgtacttctggctgatccggctgtgcctgtgacagaatatgttgatttccgttatcgggaagttcgggctcgtccaaaacagcttcaatgcggtctaatgcggcattcatcacggtcagtcgggttgcttctccataaagagctttcagaggtccaaagagatcaaagacaaacagcagcacgcccaaaagataagccagggagagtacgccttcctgatgtaaaaaaacggataaaccgaagatagcggcaatacccacgccatagagaatgtttaagccagtggtccacggtgtcattttctgctcaaacttcgtattgacatcccttgattttttgaagttttccgttaattcgtcagatttttctccgagcagattgtaacttttgataaccccaattccttcagcaaaagacaagaccgcatccgtcaaattctcgctttggttttgacgcccgacagcctccttgaaggaaaccttattcatatattttgcaaccagtgatgccagcaaggtaatgattaccgcaatcagcccaagtctccaatccagtacgaacataaaaacagctaaaaccaaagtagacagcatatagctcatcatgttgccaatggtactcatagaaacttcctcaatgaataccatatccgtactgagaacagagctgatttttccaatattccccgatgtaaagtaacccatcggcatttttcttaaatgatttcccaactccatccgtttatcagcaaagatcataaatccagcggcactttgcagacggtcgctcaaatagtgaaccactgtctgaaccactacaacagctaataatccaagtccgacaaacagacaggtctttccagtcagcgtattatcagcaaacccggccaagacaataaacgccatgaagatcggcattttggagagaatggactcgacaaatgcacatagaaatgcagcctgaatacggcttttatacctcccggagaggttcaggattcttgaaatcaatgcaaacatttatcttccctcctttgcagtagatactttccactcggcgctgtcctgagccgctttccacaacttttggtattctgggcaagcttgaatcagctcctgatgttttccggttgccaccatctttccgtgatccataacgcatatttgatctgcgttcattatagcgggaagtttgtgagcgataactaccaaggtttttccctccaccagctccgcaatagcagcctccattttttcctcattttctggatcagcataggccgtagcctcgtcaagcactacaatcggggcatccttcaatattgcccgcgccagggaaattcgctggcgctgccccccggaaagcattttccccgcatcgcccgccatggagtgaataccttgcggcagcttttccagaaactccatacaccgggctttcttcgccgcctgcattacttcctcatcggtagcatccaaacgtccaagacggatattttccagcagggaggtgttaaacaggtactgatcctgagccacataggaaatgcggctgttcaatgcctccaggctcatatcacaaagtttatgcccgccaatggaaatgctccctttctgcgggtcatagtagtggatcaacagttttgcaagggtgctcttgccagaaccggattcaccaactagggcagttttttgtcctgcttgtgccacaaaggtaatatcgtggaggacttcgttttccgctattatcggtttcccatctgggccaggctgtgtcgtctgatacgcaaaggaaacatgatcgtaagaaatgttaaaatcctgtccgtggaaatcatcctcagcagcttgcagcggtgccgtatttaacatctgttcaagtgccgtgatcttataattcagattcggaatcgtctccataaagcccagtgctttcaggagaggaatcccaatgctgagggaaaggcagaggactaaaatcaaatcaggtaaagtgcttatgccacagagaacaaaccatgccccaagaggcaaagtcagaataacagtgcagggcagtagacttccgtatatcgccatccagggccaggcggccttataccatgccaaggtataatcccgatagtccgttacatccttgcggaagttctcgtaagattcgctctcccggttgaaaaccttgacaacctccataccattgatgtactcaatgatcgtgttgttcattttctgtgcagactgatagtagggacccatgcgcttcattccaacagagtacataatgaccatggagagcaggctgatcgggatagaggccaaagacataagagccagtttccagtccgcacaaaacatagcaacataaatcaccagcgggatcagtaaatttgcgataccctctgggactgaatgagcaaggagcaattccaagctgtccacatcatcgacaaacagctttttgattgtccctgtccctttttcctccacaatgccaaggggaagtttctcaaacttcttttgcagagatacccgcagccgcaacaatgtgttatatgctgctttatgagaaattgataatccccatccataaaaaaacgcctgcaaaacaagacagatcaaaacccctataacacgcaataaaacaaattctgtttcaacagaatcgcccataaccaatggcgaaatgacctgataggccagcacaaaaggcaggatacccgtaagaacgctgaccagtacgacaaccgtggccacatacatatttttcttatatggccctgcgtactcaaagatttttttgaacataagccctccttatattgagccgtactgtctgtgcttcaaaaacaagaggccgccaaagtaaagtggcctcttatcattatctttctgtccagtcaaggcggccctgacattcataatttctaaaattcactggcggattcggaaaaaatccaaaacctttttactgccggattcgtccaatggatagctttcttttacttgccctttttccatatggactacatacgaacatcccgccatcaccaactccggatcatgcgtaataacaagaagcgttttgccctgatccgcgagtgacttcaaactccgcgcaacttccctcatatgtttgagatcaagcccgcttgttggttcgtcaaacacaatgatctcccggttactcacaatggcagacgcgatcgctacccgctgtttttgcccgccggaaagagaaagcgggtgcctgtctttatattccagcagatcaaactgtttaaggattttatccacaacagtttcatccttgttgtccatgctcagaagcacttcatccgccacgctttcggtaaatagctgatggctggtatcctgcattaccatgtagcaatgtttgagccgggctttccaatcaagggttttcccctcaacctgcaaaaagccacacttcttttccagtccgcaaatacagcgggccagagtagattttccagcgccattcagaccgataatggcaatcgtttctccaacaggcagttctgcactcggaatatggaggctttccggttcccgctttttatacgcaaagcagaaattttgaaattccatctgtttagctgtatgcgcctgatactgattcgcaggcttcaacttcgagagagaaaacggccgcagccctatttcttttcgagtgccatccgataagctgtcaaattcagcaggcgtgtattcccgttcaatctccccatcttttacatacagcacacgatctgcaagatcgtgaaggtagtaaaggcggtgttctgcgatcagaattgttttgccctgctttttccagaggcttaggacctgccgcaggtcatcaatagcagccatatccaaattagaagatggttcgtccaggaccataattcccggcagcaatacacttgatgaagcacaggctattttttgcttttcgcctccggacagagcaaacacgcttcgccccatcaaatcttcaatatgataatcggaaactgtccggtcaatccttttcaggatatcctcctgaggatagcctaaattttcacaggcaaaggctaattcactatccgtatccacgttgaaaaactgacttttgggattctggaatacagatcccaccatagcagccaagtcataaagcggcgtatctgatacgctttttccgtccagaaggacatcgccctctaatttgccctcgtaataatgaggcaccagcccgtttaccaaacgggtaatcgttgttttcccacagccggattctcccgtgagtaaaacaaattcccctgtgtttatggtgagattgacatttctaatccctccgccgctggattcttcaccataagaaaaagaaacattttgaaaatctatcatggcaaaatccctcctgcggaaattatcggggaagcaatcgcccaaaacactacaaagcaacaaaacaagatcagcaccacatcggcaaaattgaatttaagctggcaaatgtttgtgcgtttgacaggagcgccgaggccacgggtaattgccgcagcggaaagttcctcaccgattttcacggagcaggtaatcatcgggatcagcttatactccaatatttttgaagattttttccctccaagtttaatcccacgcattttcatagcgtcactgattgcttctgactcctgaaagacagttggaaagaagcggaacatgaccgttaaggggatcgtcacttctttaggcatatggattctttccatgccggaaatcaattcactgaccgttgttgttttcactgcataggcagcaatcgcaacactgggaaggattcggcagaagaatcctgttgtaaacagaacaaggaaattcaatatccccgtaaggtgcggcaaaacataaatttggacagcataaaaaacagaaaacacagcaatatagcccacagcttttgcacattgtttcgaggtaagcagcaatatagccggaaccacacaaagaacaaggcggatcagtcccatagcttctccgcctgttccacccatgacaaaaatgcttatgatgaagatgagcaacagttttgtacgcggatcgagccgcaacccttgttctgtttttttgctgagcagaatttcccgcgccattatgcaataccggcacgctggaagtgctttttgcaaatggctttcccaatcatacctccgacaaggccaaacacaaagcaggcaaccagcaaaataggcgcaatccacataggcatatatgtattaagggtagctgcatattcagtgccgtatccttcagtcagcattaccatatagctttcacggttcaggaaaatgggagcaaagttgccaaacacccagatgctgaacacaccgcaggaaagaactgtactctttgcacttttgtagtctgcctttttcaggatcacgtcagccaacaggccgccaacaagaccagttaccatagtaagatagccgttgccgaagaacaccatgattagaccaatcaggaaacccatgattgcagtcatcccgaattttttagcctttgtaacatacagcatataggggatgccgccaatcaaaggacacagcaccgccatcagcggaataaaaatggggatgaagccaagcatcgccaccagcataacaatgacgacatagatgacggtgtagatgccgatagtaattaaatcttttccctcaagccgggaactttttttctgggaactcataccagtatcctcctatctaaaaaatggtgtagttagtattttctaactacaccacatataataacaatttacgcctacatttccaacccaaaaacggttttattctacccaaaatcggtattttttaattttaaccaatcgtattttccgttttatagtttttaggaattaccccatacttctttttgaatgccgcagcaaagttactcggttttgaatagcctacaaatgctgccacctgacttacgttcaaattactttctaatagtagacttgccgccttttccaatcgctgatctataatatacgcatgaaccgatgttccaaacagcgaggaaaaaccctttgacaattttgaagtactaatattgacttttcgcgccaattcctcacaacttggtgccaaagcaagctgactgtcaatgattctcttcgcttctatgatggattctcggtcacttctggaaattgctatataagttgacgcaagaatactcagttccaaaatctcactcaaatatacagataacaactcaaaaactttgctttccaaaaacaggtatcccaatccgccgcgatattgcgtgaagtctttcagttccgcaaaaatgtgctccatatagggagtaatacctacttttgatataccttccaatagttttttctgataaacctcaatctcaccaacatcaaaatagtcattcataattttacggaaatacgacagtggtacttttacatttttgaaaaggaaatcgttttgtttggaatagcacagatattccattttcccgtgtccacgataaatacaggactcacctttttgtatgctgatactttgtcggctatctgcaatattccaggaaacaccatcattgaagcagaacaacatttgaatgtattcttcgctactcactccctgcacgttcatatctgaaaaataattcattttccagtccgaaacaactgctccctgtttcgtgaccacctgtaaaatctgccctgtccccatgtctgctggaatatctatggttattgtctgcggtgaattagagagcagatcacgataaagattattcatgtattggtttgtcatgtacaagcattcctcccgaagttagataagactaattaaattttacaacttccaaagtaaaaagtcaaattttgtaatcatgtaaaaagcagacactacttaatgtaaattacaaacttcacttacttccatttctttctgcatctcacaagacgataaagtcacttttaaaacccattgtactgacaatttaatattaattctcattattctccctgcacatcgctaaattatcttataaatatggcattttaggaacacctgacagttcgagagttaattttatctgaagttcatatttatcgtgcttttattgcaagtaataatgtttctgataatttagctgttctaaagtgcatttttgtcaattggtttaaaattttttccacactctgataattccacgacattaggctatctacagtactaactatgtttttaccacaaaaaactttataggtcaatctccatgtccattgatccatccccacttgctttatatcggtaatatacgtctcatagcgcaatcttccttgagtagccaccgatattctgcttcctactggcgcaacaagaaatttcggttctaaaagttctatcaggattgggacatttatattcaaatttttatctaatttatacaataatttttcttgttcatccctttttaaatgaccaagtactcccatgcacattacaccacttattttatctcgaaatgaatatttacctacatctatcggcaatagagaaattctctctttaacttcattatgctccattaatcttgccataaacgctgttctcatataagccgatggttctaaagcaattatttctttatcacatatcatattagccatagaataaattctttactccatccatcaaactgaatcctcatattgaatccctgatagtttccgatatccatcgcagcatctacagctttaatatctttacataccgccagaagtgctgctcctgcctctttcttttctgtgaactctttgccgccaatctccatagtaaactgctctggatctgtgattttatgctctgagtaatgagcgatgtctgccttgtagctgtcaatgatttctgtcagttttgcaatctgttgtggaaaattccttgcaatatcatcttccaggcggtactggttattcatgtggttggcttttaaaagttttaattttgccacatcaacatccaatgccatcttctcttttactgctggatttccggttgcaagagctttgacctctgcataggaaagtgccgcttcgtccacatcctcacagcttcgcacaggtgctttgctggtcataatctgagaaatgaatttctgcttgttctcaatcaactgccacatgtagctgtcaaatgtggattcagttacataccggaagatatgaacctttttattatgatttccctgacggataatacgcccttccctctgtaggctaagtacccagcgccttgccatattgctatggtaggtttccaaatactcgcccccgaaccgtacttacaactctcactgtatacggctctccatttataaactcaatttaactgtccacagtgtaatttcttatgacattctctacacaaagctattgttttgcgatttctcgctatcataagagcttcccaaaaagttttaccttgtaaatctttaagccgatgaacatgatgaatttctatgggagtattagtttttccgcatagctcacattctctggcttttattctgtcgattagctttgtactgctgaaatatttgattgtatttggaactaagtctgcattagattggaatgcttttttctgccgtttaaaaccctcgttataaaacactcgcattttctcaactcctttggaattacggaactttacagcaaaatcttttcctgctctgaattttccgattacttttgaaattgatgttctgtattttgtgccgtaggttttgtacatgccctaccatatacgcctgatctactgaaaccatcttttatcctcctctatctaaacggcatttcttcttccatgccctctgggatctctaagaacccttccgcatcttctggaaacggtggtctgtcaaccatttttgcacctgcgaattcaatccggtttgcatacacttcggtggtataaatctttttcccggtatccttatcttcataattacctgtgacaatctcgccttccaccatgaccttcgtgccctgcatcagataatctctggcaaattctgctttctttgcaaaagcctttaccggaatgaaactgacttcatcggaataatttcttctgactgccagaacaaacttggcaatcttatgaagtcctttttcattctccacttcgttgtatccgggatttcttaccaatcgcccggaaataactgttgtattcattggcttaaccctcctatgctttcattgatttgtaacagatgccgatacatggtccacattttccataggcacatccgtaacattcatctttttccaactcttcttgcttcatttcatcggcaaacattcctaacagtgttgtataaatctttttcattgcaaggaacttttcttctgctttttccatcttctctttataaaatgggatcagttcacgaagaactggatggaaacgttcattttcatcatcccaggcacaggttttcatcatacaacgtggctgtttctcataattgcccagataatacgggcagaacgtacagcctctttctttaacaatttccatcggaattactggcatctgacttttgatttccttagttacatgcttactttcaattcgctctctcatattaaaaatcctccaagaatatatatttgcaaaagggacttcccctgaattgcctggttttaagcacaaaaaaagaggcagacttacgatttttgttttcgcaagcctgcctcttatcaatctaatattctattttccaatgacataccgtataaacacgtatatcgctctaatcacatacactggaatcatgatgcttccaatcaatgctccaatgatgacacttaatgcagccatcccaagtgttgctgtggtatccattcctctcggaatcagaatcaaccgcattttatgtattccaaatggaagtccagcaataaatacccaccagaaccaatccgtctgtccactgaccttcataattgtttttgtcatccaaaaccagaataccataaatgccagtggcagaatcgattttttaattacatcttcaatcgtcatcttttttctccctctgtctgattccttccgccacctcccgattaaggtttgccaatatttctctaaccacaggagaatccaatcgaaaggtttccagatctttctccgtaagctcccttccgttcgcatcatatcttcgtacaatttttaaagccatactttcacttccttcctgctgataatcctaatgttttcaacaaatgtttaaacttctctctttttatccgtttaacacgtatcttttctatctttttcagatagacttgtattctccttgccatatcttcattgctcattctttaccctctctttctgcccacgatgccagaagcataaatataatttcttccatctgagtctttgtatatgtatctggaaaatattgtttcaatttcttcgccggaatctgcacctgaactttttcagtactttcattcatgcaaatctggtcaatttctgaatacgtcaacatccgctcttttgaaatctgcttcaattcctttgcctgcttcatggaaggtaccatattgtgattactcatatactgaaataatatctgctgctcttcagttctcaaataagaaagttcaacagctgtgttaaagggaagcttcttctcgtctgccaattctaatagctctgctactaactctgtcagatgaatatatcgaagaatctgtctggaactatctcctgtattctgactgacttcttctgccgccaacttcttgccaacttggcaagaagttaaatcagatcgttttccctgacgctttaacgcctcatatttcattttataagcaaatgccttttcgctgatcagcagctcttctcgttgaatgttggaatctaccataatcaccgtcgcttcatcatctgtaagatctttgatgataaccggcattttctctagtccagcaagttcacatgctcgttttcgccgatgaccagctaccagctcataaccaccagactctctcaaccgcacaataccaggaaccaacacgccatattgtgtaatgctttctgataattcttccattttcttatcatcttttacttgaaacgggtgatttggaaatggatgaaggcttcctatttttatctcgcaaattccattgtttgtttcttcgtttgttccaaacaacgcatcaagtggctgtaaggaaatgggagttgctctttttttagatggcatcttctagcacctcctccgtcactctccgataagcctctgtagctttgcctttcggatcataagagaaaatactctgtccttctctgactgcttccttcattcttacagaaaatggaatataattatcaaagatatgaatttgacttccatatacatttctgagaagttccatattatttctggcatcatttgtatgcgcatcgaccatcgtgaacagaatcccaccgacttgcaacttcggattaatctgcttacgaaccttaccgatcgtttttaacaactgctgcaagcctttgattggcaggtaggaggcttcaactggaatgaggacttcatctgatgcagccagcgcattgatcgtaatcattcccaatgatggcatacagtcaataatgactgcatcatattgatccttgataccatataaaatctgtttcaatacatattccctgctcattgcatttaccaactgtacttccgtacctgccagtccaatgttagaacagataatatctattccctctgcctgatgtctgatataacagtctgaaggaatatcttcatctttcattactgcatccataagagctgtaagtgtttcattactgtcatcacaatcacgatatccaaatcctgcggatacatcagactgtggatcggcatctacaatcaacactttcatattcttttgtgctaatcctactgctaaattagctgtacatgcggattttcccgttccccctttttggtttacaatagaaataattctagccatttttcatcacctttcatcgtcgtcaatcaaaaagaggactgaattagacaaccggaatctatattccatgcgagctaattcagtcctataattacaataattctgttgtttttactcttgtcttacacaaatccatttccagtctggatctgtaataattcatattctggaatgacagcgctgccttatttttccctttttcagggagttaaaaataaggactaaattagtgcaaccccttgtatttactggagttttctaacttgtccttattataactcgaccatgaggcgtgatttttggaagctgcactttatagatgctgttatacttttcgacagcatgctgaaaatacttctcccaatgcaatgctaccagcggcattttatttttatccaaaaacagaaatccactgtagccatcgataaccggttcaaccttgtattttttacgctgctccagaataatcttgaagcattcgtaaacttccggcatcatcggaatctgtctggttccggcattggtcttggtgctttctattccgtatctcatgtcagaccatcgcataagttgatgatcgatattaattttacgttccttcatgtcgatgtctttcacggtcagtccgcaaaattcagaaatgcgcatgccggtatggaatagaatgtaaaatgcctcataataccggctaaagtgtttgtcttcctttacaaagttcaggaattttctcatttgatccagagtaattgcttctcttattacagagtcatttaccagcaccagtgatacctgaaactcaaacggatttcttaaaatcagatcatcttcaagcgccatctggaatgcaggtcttaatacaccccggatggtatgaatcgtgctgtaactctttccatcctcctgctgcaatttgatgagaaatagctttgcatcagatacctttactttgctaatttccatctgtgcaaacttctcttttttcaagacatttaacactgtctgatgtcctgcttttgtagtcttttttacactcaaatcctttattgcaaggtatctttccaccagttcaagaactgtcattttttcaggattaacaccctgtaagtttttcaactgcaattctttttcctgttcccgtaacgatacacattctctttttcctgccggcaaccggtcattcttttcaagtttccaagagtagaagcttttcttttttccgttctcataataactgtaacgatagcgaccgtctggtgtctgactctctcgatcacgcaagatacgtcctttactatccttacgttttatgctaatattatttttagacatacgttttaccctcatatgaaataagggcattgagtacggtattaattttatcatactcaatgccttttgtcatcacgctcaaatcgaattcacttcattcagccactcggtaaatttttcccgcttgaataacaacttaacaccgttatatatcacaatgccagtatcgcggttttcatctgcgatctgctgcagttttctttcgccaatgccaaaatactgagcagcttcagagagagtaagtgcgtattttttccataaagggacttcattcgttttcacattcatattaatacctccaatcttcatttcctggtattaatatgttatttttttcgtaaaacagcaaaaatcacgcatctatttctatctttttgtatttactccatttttttcacattttatctatttttcttctgtttttaattatttacacagcaaataataatcccttctattttcaattctaatttttatgctatactgtttatagcttaattcgtttggagggattttaggatgaattatcgtataataatgaaatattctgcaaaagaaaattgctatattgtgaccgttccagacctaccggggtgtatggcggatgggaaaagtccaaatgaggcatacgaaaatgtaaaaaatgtgattacagaatggatagatacggcaaaggcagcaggtaggacaataccggaacctaaatttgcccaggagaatttttaagggacagctttttgataggccgcccctttttctgtgtttcttcttattaaaagaaaataaaatctataatacgatgtagcaaagattgattttgctgtgttgctgcctgttgaaattcatcctgttgctggcgcatctcttgaaattgttgttgctgaaattgctctgtctgttgctgaaataaatcctgctgcatagcgtcctgctggtagtacaggtcattcatagaaaaatcatcaaagccgctgttaaaatcattaaatccaccaaaatcatcaaacatttttgtatacctccacgttgttaatatctgtaggttccgggattcggataccttcctcatttgctgcagttatccaggcctgtttcgcgtcctcaatcatcgccggaatatcttgccatcgttgacagcacgtgatacatccgggcaggtctgggatagatattgtataaccgccctcaactggatcttctacaattaacactggatatgtcactatcatacctgcagtcctccatttttgtactggtgggccagccggtaaaatgtggttctactcagtccggttaagcccatcgctgcaactgcggtaatctccccacgtgtccaacgctgcatcacctcgccgtagttatccggaagctgcacttgcggcctaccgtagttcctccaggctggtttgtcacggatccggtcaacgccctgggtctgctttttgtgggttcgttctatctcgtggtcaataacataatcgagggtacttattacagtatccaggattatattactaatctccggattgtccagataatcaatcgtggttgttgggatatccagaatttttacgcggatgttatgagctctataatattccaactcactctttgcacttcgttttccgccaagagcctccaagtcgtaaattatcagagtgtcaccggatttcagtaggtgattttttaaccgttggtattcttcgcgctccggtatctttccatgaaatcgttcaattacagcattgtcaacagttgctcctaccgcctgcagtttctttctgtgcgtggcggttctgtacgtagatatgtaatagtatattttgcctacatgttctatggatcctcctaattgttaattttcttaatatcagacatttccgggtgttgccgtatgtagtatggatttgtccggccaccagatcatatgaaatggtggactttttggaatattattgctgggttactataattagcagagcggtatttccgccagtgcgaaatcagggttgctgtcggtagcaatgcggatactttggagttgttcttgttgactgatggaatttctacctattatatgggacaaggccaggttaatcgttctgttagcttcttctggtgtcagtccaacatagttttttagcgaaaattctgtctgttgaaggatttcgtcaaggtttcgttcaacgagttcactcatataatagacctgactttctggcattgttgcgcgctccttccttttttgcggtttttaagggaatctctaggctggtaataattacaggccgttaaatcaaattaacagctagcaatatttacatgttcagagttccccggcaaaacctcattttcatttgtaaaagttctttttctggaaatactttttgaacactaagccattttttatggttcatataaaaataagaaaaactttctcctcttacagatctgataatgctattatacggctgctgttccaaaaagtctattgacgtcctgtccaaagctattgtatacacaatttcacaaattcatttaataaactgacaatatcgacctttttcctataagaacaaacgcacacaaaattttatgctacaaagtcattattgttgtgaaatctgtacaaaattttatcatttctccgcgctttcctccttgaaaatcattcgtcattttgcacaactaaatattcagatatctgaataaaaattgatgtatcccaaaaagcattccaaaagtcaatatgacgaaaatgctatttatccacataatacctatatttttaagtagtttcgtgatactatttccacataaaataacagaaaagaggtgttgtgcaaaatgacgaacatagttgattacggcgaatggaatcctgacaggattgaaacggatgacgaggatctgaggaggactatctacgcctattactgcaatgctggttatccgcataatctgcaggaggctcttaacactactatccagattttggattctgaggacaatacgtacctggagattgagtctttgataatggaacttgccggggctgctgatttgtggggtttccggcagggatttcgggcagcaattgagatgctatccggtaacacattcagaaaaatttttaacaaggaggagaatgacaatgaacaatgaagaaaaagtaagaactgttgacgagctgacgcttcgtaaattgcacgagatgactgctactcctctcaaaacaacagctgagcgcgcagcatacctcaagggccgtagcgacaaagtcagggaaataattcaagatttatactgcaatcatgacagcaatcttcactctatctatgatttttttaaggatcatgaaattggttatgaggaaatcatcggttggaaacaggaggcggccgattatatggagcgacgccttacaagccggattgcacgccgtgccgctgtccagatgctgcaggatggagtaacgcctggcgaagtaaaagaaaatatcgaaaaatggttttctgtccgattttcggacgcgcaaatggttacacttcggcgtcaggcagatcttgaccgttgtatgtctgaaatgacagttgtattagatagggaggagaactgaatatggaatgcagaaccagcggtgcattgcgaagaaaggcacttgacagaattcttaatatatttccagatgatgcagaagtgtatgaaaactggcagagatacacgcaaatctattcaatgggatataaagacgcccccagtgacatgggcgatgttgttaattattggagctctttgggttacgattacaacgccgggtttgaggagggaacccgccgtgcactgttacgcgtagctctgtcaatagttaacaatgccatcaaacacggagaatcggaaggatatctattcgatcagatccaaacttgtacctctccggagtgcttcgccattgtatatttattgtattcttgcctacaacagccagaagaggaacgcctggctatcgcaaaacaggatttccttagaaaaggaactgatgatgacgatgagaatattatgacagaatacggaatcgatctggagacctgcaaggcctggaaacaggaggctcctcaaaaccgtccctacactaaacgctatcatgcagcggatccagtcctcctaaaaggtgcccttgccgtactacagctgctgttcccggatgagaagagcgcctatgataaaatcgaaatcgggctcaagatctatcttgccggattttatgattcaattaaaaactgtgtcaagacctggctgaaaaaatccggtaacccacagctaatcatccagttactgcaggaactcaacacattattccgcgcaaacactcctcccaatcaaatcccatcctctcttgtcgatcgggcacccgatcatgcaaaaccgctttttcaacttttaattaacttctataaagaaagtctttatgaaaagagttaaggggtcaattacgacccctttttaattcctctccaaaatcaataattcccaaacaaaacctataaaaatcacctcaaaacctataaaaatcgagcaaaaacctattctctcctaattctatctctcctgctgccatttttcctccacgtcattctattttttagaaaaatcacttatgccttatacggcattaacttttaatgcttatgcctcatacggcattaataaccttcatttatgccctatacggcattttcaccgtttaattatgcctcatacggcataaaacaactccttctaaaatatcggttatgccgtatgcggcattaatggcttttagttatgccgtatttggcattttctattttttctcaatatcatttctgatagtttcccgttttaaaaaatccgtattttctaaaatagaactgttttaaagagaattcgtgcgccgggcttgttctaaaacagtaattttaggacaagtacttccagatctttaaaaatgtcaacttttacggaaaatcaataaatctaaaagttggcagcagttttttaaaaaattttcctggaaatcaaacaaagcaatctaaaaatcatataaacattgctattttcccaacttttattgtcctaaattccaacttttacgaaaaaatgttaactttttttactaaaaaaacaagtgattttactagaagagaacaacttttactccactaaaagttggcatttaaaagttgaaaaaggaccggtctcccgactctactctttcaaaaaatctatcgcgtccgacataccagcataatatgccaatttctccaccattgtattccgggattgcatgcagcagaaaatgctgtctataatatccctgtcgtgtctggataatggcaatctctcatacagcagctgcatattttccaggtcactgttcgtaataagttaatagacaccaacactcccaatatagcaggaaacattggacttcagaaatgggcaaataaggaaaatttaaaaattgtctctgctgaatataacaagatgttcacacataatctacataatttttcagaacttgaagaccgcatagccttgttacatatgcagcaaaaagaggtaaatacctctgttgtttctctcgagtctcagatacgccatcttcgagaaatgctaaaatatgccgaacaatatcagaaaaataaaatttacgacgaccattataaaagctccaaagatccagatcgttatttccgtaaatatgaatctcaaattattcttttcgctggtgctaaacatattttacaggaaaatggtatagacctgaaacatctttattccaataagttacaagcgcaaattgcagatcttatttccagaaaggaatcactaaatactcaatacgtttcctttaagcaagaaataaaagagttggaattgatacatcaaaatctgtccaaatatctcaaacaggatgctcctgaaatacaaagatcttctcataaccaactcccttctttgtaaaaccataataataggcagcgatttcactcgctgcctaaattcccattaaaccgatatcctacacctcgtactgtttgtatatataatggttgtccaggatcatcttctattttttctctgatattgcagatatgtcgcataaccacattataatcaccggaataaggttcattccataccagatcataaaccatttcttttccaaatattctacctggacttttcgctaaaaaaagtaaaatatcatattcatattttgaaagatgaacatcactatcattctttttaacaattcgttcctgtagatatatttttaattctccaaaccttataatttccggtatgaattggtttttatgttcccagctagtcaatatgttttcacttatgcttccattagcatctgtgattctctcaataatttctatctttttcacctttattgcctctacattattaattttatattctatatatcatctgccatttgacttttttcttctacaagtaatataatatatttattacatatgtaggatttagcaggaggattttattatgtcactaccccagatttcagaagccgaatttgaagttatgaaaattgtatggaaatatgctcccatcaatacaaatgaaattacagaaaaacttactctaactaccagctggagtccaaaaacaattcaaactcttatcaagagacttgtttccaaaaaagctctttcctgcgaaaaacaaagccgggtatttgtctatactccattagtccaagaagatgaatatatacgccaggaaagcaattcttttttaaagcgatattataatggaaatctttcttctatgctggcttcttaccttgaagacgataagctctcttcaacagaaattgataacttacgccatttattatcaaaacatcagaaataggaggttttgaatgagcaactggatcatccactttttaatcagtaatatcttcatatgtatttttacacttgtaataatcggaacaaaaaaacttctgaaaaaatatttatctgcgactacacagtaccatctctgttttcttttatttttattacttgccgtgccattttttcctgtacagattcatggctcacaacttttttcatggttacatttttttcaaactgactcaggacttaactctggtaccgacacgctatccgaacttaccagtaatacacaaaatattttgttaaaccaggtgaatgatttttcagtttccatcagtagtcaattttctggaggcttgaataccatactctttctaatatggataacgggtgttatgattatgtcagtcctcacccttcattcattaaactatgtacgttccataaaaagatctgctctcccgcttcaaaatcagcaggtaaaaactatttattacaattgtttaaaggaacttaaaatctctcacccagtatcagtctacagtactgcatttttaaaatcaccagttttaatcggaataatacatcccagaatttacattcccatccatttaatttccgaactgaatcctgatgatatgcgttttatgctgctacacgaattacagcattaccgtcacaaagatacatttattggcttcctcatggtcataagtaatatactctactggtttaacccttttgtttggtacactttaaaagaaattctctgtgaccgtgaaatagcctgtgattctgctgtattgcagatgatttctgctgatgaataccaagcttatggaactacactgattaattttgcagaaaaaatatcctctttttcctctccactggcagttggaatgtccggaaatttcaggcagatgaaacgacgtattctcaacatcgccgtttttaggaaagaaactctttatcaaaaaatgagagcattgataatttatctggtcattagtgctgtttttattggatgtacacccattttatccattgatgcctctactcaaaacgtatatcattttagtgatacagacaaaaatatctccctgttagatatatccgaaacatttggaacatatgatggatcatttgttttgtatgacaataatttggattcctggaaaatatacgatcttgaagaagccaccaaacgtattccgccagagtctacctacaaaatatacgatgcattattagggttggaatccggaatcatcacaccagaacactcttccatgacatggaatggtgatgcctttccttttccatcctgggaagctgatcaggatttaaactctgctatgcaaaattccgttaactggtatttccaggcaattgattcgcagctcggaattaacagagtccaggaatttttgaataaaatagaatatggaaaccagacaaccagttcaaatctggatttatactggtccgacttttcattaaaaatctcgcctttagagcaagtaacattattgaaaaaatttaacacaaatgaattccatctaaattcccaaaatgtattttctgttaaaaatgctataaaaattgccagtacacctaatggtaatttctacggaaaaactggaaccggtcgtgtcaacggacaggatatcaacggctggtttatcggatatgtagaaacttccgataacagctattattttgcaaccaatatccaaagtgattctaatgcaactggcaaaaaagcatttgaaatcacttctgatatcttaaaaaaattacatatatggaattaacaaatatgaaagggctgatagttgttatcagttctttctttttattctatattgatatttgggaacttctttcgtaccattattcagaattttattccccatatatttaaaactcttatcatcgttgaacttaacagtcagctcacttgtaataacggcatcattacatataaatgtatcacatacagcatcaacaaccagcacactgtttccctctccgctatctcttatttcaacgacctccggtaaagatgttccaaagctataattaaaacaaccaaattgttcccagtcataagtttgatgttccgaatcaaatactgcccattttttaatttgctccgctgttatcggcaaaaactccattatcagattttcaaactcttctgccggaattccacttgagttacctgaaaactcatatctctccccgtatttcattcgatataaatattcatataaaccattataatctaacccttccatatcagatctatcccaatcagaacataaaagattattcccctgatatccaagcaaatacacacacctctttgaaacttccctgcattcatcacttaaaggtttaattcttatcatagaactgccatcaaccgcttctgatacttccggatactttggaacgcatagcgtataaccaaaccagcctttttctgtatatttccattcttctatccttgtatacgaaacatatacaatagatggattgtcgttcataccccaaacagctttcacagccagcaaatacatatctgtcccatcataattgaatttgagtctttctatcccaccatccctgttaatcctatataagacgatatctcctgtcagatcctgttctgccctgaaaagaaattcttccattttagaataattagccatatttgaatacggtgctgatgtaataacggggacatttttttcctttaatacttcctgcatttcttccattactgtctcagaaactactatattcgatgaagtccctttatccgccttttgataaatgactttcatctgattcataacattcttacaatcttcaatagcttcttctttcacgacttcatctactggcaaatcatatcctctttcttgtacagcataattcgcagtttcctgtgaaatatattctaaatcagcccctttacattttgtatttcctatgaaaaagcatcccgaaataaataaaacgctcatcatctttttcagttttctttttgtaatcatatcaattatctccataacattcctcccacttttcgtctgataatctttccgtataccaggtaacctctatttctgaccttgatacataattggatacatattgaaatctatctttatctaacagccgaatggttacgctatgacaaaacgcctgatctaattctttttgtggccataccgcatttacttccagtgttattgttccatcttgattttctatgtaggaaacaacttccggatatggaatatatggtgtgggagcaaaatcatatacgattcctctggttcgataccgatatgtctgtatttctgtgtgaaataccgttcctgtctgcagtatctctgcgcttatattaaaatatttttgaaatatcgtttcaaatgattcttttgggatttcataagtctttccttccttaaattcatcagttttttcttccattgaaagtaaacgatcaaaaacatcataaaaatttattccatcataatttttttcactccaattagaagtaaacaatttattaagtgtatatccaaaaggaagtatatattttcgattcaactcccgacattttttatttaacggtgctacccgaaagtcccgatatccagacggtccatcatatcctgccggatgatattcttctataaagaaatgcccgttttctgtatatttccatgaattagctctaaactcatgataatatgtttcctgccaagtgtcctctttccatttaaaagagcttacttcaacgtctattttcccctgtttggttttcagatcataccggataaaataatcccctgctataacttgaaatatagtagtttttccattcttctctttttctgcttttttcaaaaaatcatctactttaatactttgaaccatatccagctgattgtaggaatcaattactgcatatccatattttccaaaataatccatacttttttgtattgtactcagctcatatagtgcattttctttcacagcattctcatatatgttccgatagccttctgctagcatttcacactctctgtaaattttttctttcgtatcttcaattgtctttttctgctctttctttatgccacatccactacagacagcaagaaaaataactcccacaaatattttccaaatttttttcatatcattttcctcttacatttgtaatatttaaaggtaaaaattattcattaccaagatattcatccagtatcgccttatccttttccaccacataaccgcttcctccaatatctttcacattctctaccatactgatgagcaaaataggattctttgtatctctatctgtagtaaaaactgtaaaccagccaatttctgttccagatgtatcttcttttgtagctttcagttccgctgttccggtttttcctgctaatctaatgtcttcccggcatgctccataaccagttccttccgggttattcactacaccctctaacccctccataacctccgaaacaatttgtggtgaaaaagcatcttttatccagatttcactggaagtgcttccaccatccgcgtgaagatatggctttatcatatttccatcatttagaaaagccgtataaatgcttgcaagatgcaaaggatttaccagaatctgtccctgtccatacccactgtcagcaagctggatttctgtttctatcttgtccatattagaatattgggactctgacattttaatatcaaatggaagttcctgattaaatcctatttgatttagagactgcatcagttgatccgcaccaatttttaatgctgcttttgcaaaataaatattatctgaataaataagcgcatttttcaagatcacaggttcataatcatgaagtgtagtcactgtataatctccccacgaggaatctttctgccacgccagaccctcatttccaaaatcgtcatttgcagtaaatgcccccacttttaatccaattgcagcaattacaggtttaaaagttgagccaggacaccatgtctggcgaaagcggttgtataaaggcctgtcttcattttcatttaatgcactccactggctgttgtccattccacgtacaaaatcattattatcataagatggcgtacttaccaacgccaatacttcccctgtataaggattcaaagctacagaacatcctctgtcttctttaaattgttcataaagagtactttgaagatcaccatcaatcgtaatatggatatcttctccatcttttctaggctcatatgcaataacactttttttatttccatttgcatctacaatacagatttcacacccatctgttccttttagttctttttcataaagcgtttccagtccagtctttccaatcacactgtttgtacgatacccttcccctttatgttcctgcaaatcttcggctgtaaccgcctgtacataccctaccagatgagaggcagcttcttttagataataagttcgtacttttacatcagataacataatacctggaatcttcaataatgtgtcctgcttttctttttcttccagaacagttttatccggattcactgtcaaaagatcgacctcttgtattttaggaattgttgctactggtacaaaagaatctgcttttacccaaccggcttttaacttatcctcaatttcgtctgctccaattccaagatactctgccagtttttttattgtatcttctctgttctccatcctgcccggaacaattcctaccgaagatgcagttccctctccagccaactgacgaccatttctgtctaaaatatctcctctctttgcctcttctgacgttacctgaactttatccgttgcagataactctggaaaaatcaactgatcctgccagattaaatgatatcctgtccaatcatgtgaaaataccgcatcgttggtaaattctacatttcctgcagcagtctgcatatttgttgtataggaaactgccgcatttccgttttcttgtctttttactgtaatatcggttatggacagatcagacatctcaatgccttcatatattttagaatttcgttctataaattcttccttactgttcatgctgctttttttctgatccagcatggcatacatttgctcatattcccctttttcaatatatttcatatattccattagtcttttttcaggaacattacgattcattattgttacaataccgattccaccaccaatcaatataccgctaaataaaactatttttgtgatagtcttcgtgtgtttttttcttttcgtttttctcatatagttttatttctccttttttcgtattttcttaaatattacacttgtaatatttaaacgtcaagttttttcttaggtttatatatgtaaacaagaggaaagatttggataaaaaaagaaagggcatctcaaagccctctttgataaagaactttaccgacaccctgaggtaatggtttctccggatgtttcccaaacgctataatcactctccagaagaaccaaaaacgatttttaattttctctcagaaaaaaaaagaactactctaaatctgctgatctttgaaataaccctgctcgtttcttataatcacaaacatattcaggcaacacattctttgctggcagattattatagcggaaaacgcaacaaatccttttattaacttttgttccatatatttcctgtaccaatcctattgtttcatcatctgaacaaaagctcttcggaatctccctacaatccctgataataacgcaaatctgtttactatgtcctctctgtcaatatacaagccagctaatctctttattatagtatctaaatacttcttcccaattccactactcaaaatttcttcagtcactgtttctgcagatgtgtttttatatcagccagagtttccctggctgaattcttccaatatatacctgttaacacttctcaatgctgacactttttccttcgcttctcatctttcacctgctatactgcactctggcttgaattcattccccctcttccagttccgatttataatcttccaagtccataagaaaagtctcatagccttcatcactcatgcagaacagctttcttagggtattgcagacaagtccgatcatatccgcatcccctttcagaaatggaatgatatggtcaatagcttccattgtgtcatttctgtttcctttatcaaacatagatgactttgaactaatggaactggacattgataaatgccgcaacctcttcaaggtcatcgacagcagagactgccatcattctacaacaacaatggtgatttcgcagattcctatatccaactggtacgaattatttcagggtaacacttatgcggatgcctgcatggaccgtatcatccacaacgcatatcggcttgaatttaacgggaggaatatgagaaacccttccaagtagcctacaaataaatctacaagtggtcagataaagcgaactgatcggtcagctcatccgagccgaccgatcagtttgaccgaatttggcaagcaggatcaagtaatttgataaattcattcatacagatatccttcgacataaatatagttttagatattatatagctttagcactttaaaatcaaccaagcacagaaagaaccttttaaacgcttactttataaatgatgacacaagcaaataaaaaccactgaatcccatgataaccctcacatataatttcagtaatttttgtttacattttgcggccttgcaatgttcaattgtctgagaagaatagaatttaattataatccggaacgtctggcaaacgattcataatccactccaataaatagcaccaaaatctgacacaatactgtagattgtcccatgtaccaatagttctctcttcaaaagaatgtattccatttctatttgactgaattgatttcaaataaaatatttcatcatcatccataagtttttgccaagcgtaatattgaatgatttcatctaacataactctctgaaccggatgttcatttgtatgctcttttattttatctttaatagcttctttaagtgatttgccttgtttggaagtaagaactccctgttgcaccaatccgtttatcgaatcaataataggaatttttacttcgtccacaacaatattttcccattgtttccattttgtttttttataatcctccatataaaaagctaaaaatatctgcaaagcaaattctgtgagtgatccaagtaaaatccagctatttagcctaaatgcgttatcattaacgttctctatatcctcatattggtaataatatccaatctttatttcttcagccattttttttgcaagattttgaaatctcctcaaactctcctctgttattaattttattgcttcttcgttataagaaaatggcatcagttccagcaaattatcaacaaatttgctacttatatccaccactttttcacctaagtcttcccaattgcagtccatttttccatcccataaatattcgaccatttcttgttctttcctcaattcatattattatattctcttactccttttgtaccctcttattttttgaatatttttcaattttatctgtaccagccttcaacttttaattcttccagtgtcatatctatcatcaatatcttttattgatacagcaggaacattaacacttaaggcacagctcaaagctactgcaagtataaccatttccttcttcattcttcctacctccatagtgaattttttaataaaaaacagcacaacaggaaagcaatgccttttaattatcttcatctctgcttcttgttgcaactggctataatacatttgcttagaccctatatttatcccttgcatacaaggtgatatggttatctctcattctttataaatctgcctataattttctccgaaagtatatactttcggagaaaaccaatatcaattcagagcttctaacaacgttcactacttcaacaaatcagcaagatataactcatcattccggtgttttcctttcaattgcttataacgcttaatagtatctaccagcaaatcgatccgctctccataatagatacgataaaattctgtactgttattataacgtgtacgattataaacaatattttctttgctgaatgtcttaggagatattttagcttttactttttcaaaatccaaattcctgttttcggaaataataagtagcatctctaattcaggtttcgtacagtattttctgatatttttgattttccctttgtactctttgggaatttttaattcttcgttcaatttatctccaatgcgtaatacttccacatcaccataatacagattcaatgcattctttacagaagcattatttctgatctgccttgcatgataaggaaccaagttcagtaaatcatcttctgtgaaaatcagtttgtcatgttctaacaacatcctgataatctcaagctcattaggaccttcacacataatcagatacttcatctcatcagctcctttttcaatgccataagatcttcataattaacagaagtatcaaatacattattataaaactggcggctctttaagagctctgttcgaatattgtaattctcatacatattttccagatgaattttgttatccgattttgcgatccagatattatcctgacgattaaacagatccaacacttcacagtaatgagttgtaaatatcaatgttgcatatttcttattcacagttttatctttgaataaactgatcatattttcaaccagagtcttatgaaagtgattttccacttcatcaattagcaggtcaaaaccattttccaaagctgcaactacaaaaatgtaaagcagcactccctttgtggtaccactggaaagtatataaacaagttcggaatctgaaagttcctttacgtgatcctgataaataagtttataatgtttttcatcaaccatttctaaactttttatcttatcatcaaagattttgattacctttactagaatattttcaggtattttatacgttttcatcgctctgaacagcaggtgatacgtatcagcaccttctccattacagttaaaatatactgcacgagtagctttcttttttaaaataaaaaaaacaattgatgtatcttccggaagttctccaaaacctgtaatttcttcaaatccctcaacagcataaatttcttttactttggatttataatattttttctgataaatatgttgctctgtgaaatttgctttacttcccaaattcgaatcagatttcaatcctgtagtgtatttataaatatttcctttgtaatagaaaattatttctaatttcacattatcataattgtaatgtttatcttccaaacggaattcactgagaattgaataacagcactccatcagttctattgcggaagtttttcctgaagcatttttaccaacaaaagctactgtattaaaaacatacaagtcatccgcaatctcttgcagttcgtattctttatcttcacttgtctttttcgatttagccactagatcaatcgtaaaatcatcgcagcaatttttataatttgatgcacgaacccttaataatttcatataccacaccatcctttacttccatttatccatattatggcacaaaaataaaattaaaacaacatttttgttttaattcgtttttacagtatgtaatatcatagttactgtctattgaatacatattttctattctagtttaaccaatatatatcttacaaatccatatccataatattccggactatgtatcccacatctcacactgtccttatcaacataatatcctttaattgctttaggcttcgtttgaaaagtacttctctctgatattacttctatctgtggttccgggacctttaaattcttacttctgctccatcgctttttctggagcgcaccatcttctttttttctatgtttgtctgtatatttgatcagataactcgcaagttttgcataatttcctgtatcatccaacttataggcttttatttcactatgcttatcataggctttattccagcatttctgcaatattgctacatcgatatgatttacgaccaagtggtggtgtctggctcctctttctccgatttccatcacatggatatatttgaattctaatccgactttcttatactctttacggcactgtcgaagaaaaacatcaatatcatgacgcatctcttcctctgttcgatcagcttctccatctcctcttagataacctaatatgatgtgattatcccctccaacaaaattggcatttaacagtaatcttaacattttctcagcatttctcttgttaatttctttctgctgttctgatgtgggcttaaccttatctctcctcttttgacctttttttccatatctgtttgtgtagcatttctctacttctatagttttccctgcgaagtatgttttctttaagtatggcatattattcatctcctatcttgtcggtaagttaatgctcttatcaagtgtgcaagccagatttctctggccatttgtcgtaatatacacttatataattcaatatgtcatttattttgcttcgtgtcggaaattagttcaagctaacctgatattcttatttttcgcacaaaaaaaagaagagctactgccctccctcatacagatcactttaatattcaatttttgtttcatttttcattccaaatgtactcaatggcccttattttttgccaatagtgctaatttagtgctaaaatcatcctccaaatcctcacaaaccgcataaatactggttttccggtgtcatagtcagatattgccgtggcatacgaaaagtactcgaatcattgttttttctcctctcaaattgccttgaaatgccgtattttgcaaggttttatcagcatttcaaggtatcgtagttttcttctcatttactacattttttgcaaaaaagtgcaaaatgaagcaaatcacttccatctgtagtagtcaaatcgtagtcagtttagggggggggcagactactgctcaaacaaatttcccaacttaattaatcttctaatatcttcaaaatgcagtgctaaaatctttcttcactttaatcatttaactgcattacatgaacatccatatccaatattataggaacatgcataataaaatacattcagtgatttctccgttatttcggataaaaaatgctgatacagaaaccggatggaatgtgcagattctaaggtcagtatggataatatcagcagaaataaggtatctgctgtcggaacagaaaaagtttcaaaataaatcaaaaaatattgatgaagtctaccaatcagtgttttttcgttgtataatgtttttgtcgtacagggtcactttcctttgtaatgttttgggtcaaattcattatacatcagaaagtcctgtacgatatttttttatgaaaaagttgtaaagtggtgatcattatgaaaaaaatagagaaaattggaaaaatcccttcaagtccgtaaagttgttatatcctccagtgcaatcgttcaatccttttgcagaacggacgagaaatcccttagagttcatcatgtcgaaatctatggggtggttcctgcattcatggaatgaaaaatatgcatactttttttgtttcgttgtccttaaaatatccgcacatatcgtaatgccccgtctcaaaagtaataagccttaatccatattttgcggcattaattttcatgctctttttcatgtcatttgcaaaatctataaattccttggaattttttcccatagtcatcttttattgtttttccctgatattttctgtatagttcttccaaaacgttttcctttcatattctgaacttttgaaatgatgtcgccattgataacatttttattatacaggaatgaggcggtaatcgcaaacacaatccacaatacaaaatgatattctttttttctggatgtttctgtgatatacttatacgcgatcgtatcagaccggaaaggaaatattatgttacaaaaattatatgtttttttcaggaaagaaaccgttttgtcaattgcagtgatcctggcgcttctttctatgttctgggtcagaccggataaggcttattttacttatatcgatttcaggactctcgggctcctattctgtttgatggcaattgtagctggtttgaaggctgttggtgtttttgatatacttgccaaaaaattgcttatgggaacatcgggaactgtgggtgtgatcaggctgttggtactcttatgtttcttcctgtcaatggtgatcaccaatgatgtggcattgattacttttgttcctcttgcactgatcattgtgcataaactgccaaaggaactgggcaattactggcttcttaaaatagtagccatgcagacaatcgctgctaatctcggaagcatgctcacaccaatcggaaatccgcagaacctttatctatatgccagagcagggatgtccgcggcagaattaataaccctgatgcttccctattccgccacagcacttatcattcttctgatatggatacaggtagctgctgccaaagcacctcacgcatgcggttccgaaaaagataaaactcttttgggattctctgacagaaaagaacttaacatggaatacctggccgcttacctgatcttatttacaatctgcctgctcactgttgcacgtatcattccataccagattcctcttgtattggttcttatatatatgctgctaagaaacagggaaaatataagcagggtggattactccctgcttgccacctttatcgcattatttatttttatcggcaaccttggaaggattccgcaattcagcagttttctggaaagaatcatggcaggaagggaaacacttactgctgttcttgccagtcagattatgagcaatgttcccgctgcgcttcttttatccggctttacagataattaccgggctttaattgtcggaaccaatattggaggtctcggcactctgattgcatccatggcaagcctgataagtttcaaatatattgcaaaagaaaacaggaatctgagagggaagtatttgggaatattcacagcctccaatattatattcatgatattcatgttaatattgtatttttttcttagataaaggttttcccggaattacaaaagctatagcaattctttcttcgcaaaaaattctccgcggcactctcacatcctggaagaaaagccgcggagaaataaatatattttcggtgccaatacaaagattattaatctttacaccactttacaactttttcataaaaaaatatcgtacagggctttctgatgtataatgagtttgctccaacagcagatattttgtttttttaacttgtactaaatcttgacataggaccagttcccaaaaccagaagtcgaacaccattattttcttttccgtaaatttcaggaatatcatccacttttggattgactttataaaaagtattacttttatctgcacctgttctctcctcgatcaaccttctcattttactgataggcgtaatactctccagttcttcctctgaaaaacccagtgcaagtccaagatttgcatctggatccacatctacagcaaatacttttttcccttcttctgcatacagccgtgctaatactgcagatatcgtagttttccctactccgccttttccagttacagcaattttcatctgttatctccttaaatacttcttactccacttcctccagttctgttccttctggaagaatatatccgcagttatcacatactccgtcctctgcaagtatcccgtctttcacaaaggcttcaatgcctcccggttcatgacagcgtggacaatctaattcccgtatctttttctgatttcttacatcctggcaattggcaaattcaatttttcccatagtgatttctccattttcattccatatcaatttgtcttcgcaaaaaagttcctaccatacgggaaaaatcgctgatattacgaatataggcaaagtcttttccatagattctcttttccacggagagttctccttcattccctacaaaaataccaattacgaaaattccctgatttctggcccgacgcacctcataagcagtatctttcacagctccttctccgtcatagatcttgggctggcgggttcctggtcgttgtatgctcatatcacagggttttccatcacttaatacgattaaaatcttatttttttccggtcgctccatgagagaggaacagactgttttcagtgcaagcccatctctgttattggcatacgcccgaaattgaaagattctttcatttgtttcccttggatcttcataatcccgaaatctctgaagtactgtatatccccagaaagcacagtatcctgtcacccgatgaggaattcctgcctggcttaatgcttcactgataatatatccctgcgccgctacctgagcctgtctgccagcttgggaaccactggaatcaatcaggacgtctattacaaactcagaatcttttgctctcttttttctattaaataacttgtcatcgtctgttcttccaattttccataacctttcaggaacaagctgccctgcatcagatctgctggcagaatcatcctttcggattataaatgcccgtttcagtgactctgccaacacagaaatatttcttttgatgatccagtgattatttccataataggctttatttttttcaaactgcagctgagaaaaacggtattgattattttttatcacagggttctgtaaaattccatctgtaagatacaggatacagtttttgtggattcctgtacaaaatttccggttgactctggcctgctccgattcacttagatacgattttccgtaattcagttccacatactcccgtatccgtcgcactgcctgtggatttatattctccgagcttttcggaacttcttcattttccggcaagaaataaaatctttttttctttttgtttctgatatccagactcatcatcttttttttgagattagaaagatatttttgaatgatgtcttccatctgttcatccgtcatgcattcctgccacgcatcattggccaatgccatatccggtaaattcagaatcttctccagatttccattctttttttcaaaagatggatccagaacatgattataaatctcatctatcacgtttatgacatcttccgtattttccgcatccttcagagaaagaatcttgtacaatgaaatctctgcctgtggatccactccctcatcgtctgtgttctccagaacatgccttatatacagaagcctaatcctgtgaatcaggtctgttccagctttgtctgatacctgctctttctcggccttttctaattctctgaacgcctgttctctgatttcctttgttcccaaacgttctcgaatgataaaacgctccacagcagcatccatgcataatccagcaagaggcaaaagtatatcttctccagcagaaaaatgtaattttttcatcaaatacatgccaagtttcttctgatcaaaatatcgtgcaaaggcaccctgcttcactgcctcatacagaaccgtttgttttgagtaaacatatttttctgtgtccggttcaaattccatatcataatcaccactgactgtccaaaaaagatttctgatacgattgctgatctccagacgatattcttccagttgttccgccggccatctgacatcctccatacaagtttacccccatatgtcttttccggtccaggaagatgggattctggtagaaaccacatcttctatgatctctttttcaaatacatcaaaacttttatttatgattcccatctggattgcatcaattggagaaagtccgctttttgttgcttttacagcagaaaccaatcctctcaggtcaagagattttgttgagatttctccatgataagctttgatctgcaaatccagaaacagtcctgcaaaagctttcagcgcactttttttcccatctggaaaatgttatcttaatacaaaaaggacactatcctcatccatttcaggcatatcaattaccataaaccttgaaaccaatgcttcatttagctctctggtacctgcgtaaccataattcatcgtaccgataaatcgtgttgccggatgaagtaaaatcctgttatatcctggaatatcgattctgcgccgatgatccagtgtggcatgcagtacagaaaccgcatcattttttgccatattgatttcgtccaggattccaaatcctccaaattccgcgcattggtagatggggcctttccgaaggcgaacctcattatttataaaggtatccgttccaatcagatcggcactgtctgtatttacatgaaaagaaatgtcgtattccggtcttccaaatatccatgccagtgtctcacatagtacattttttcctgtagctttcgcaccggaaagtaacaggttatctccctgaagaagcgctgctattgacatttccagaatctttttcccataaaataggatatccggtttttctacccgttcctttacctgatcctctacctcataacgcatgtgaaaatctctcagttctccaatcagttcctgcgctatcttctgatcttctaaatatttttctatttctgtccaatgatttctcatgaagatattcctttctttgcaattggttataccaaatcagataatatttctgtttactcaatcttcaaactttcaatcctccaactcacaatcctaacttctttacaatttctcccagtgcacttcttacaggagaatctttcggaagccgtatgatcggctttccagcacagtcatactgatatacctggtcatcatgtggtacaacccctaacagttccagtccctgatttcggatttcttccagagttccggcatccagttttccatctggaacacgattcacgattaatccagttttctgtggtttaaagtttaactccttcatcagctttgcaatacgtccggctgcctgaacacctcttctggaacagtcacttacaagaatcgcaacttccatcattggcaggattcctctgctgatatgttccatacctgcttcgttatcaaccacaatatatggataatggctttgcagtttctgaacctgggtctgtacaagaccatttacaaagcaatagcagccctgtccctgggttcgccccattaccatcagatcataatcatcttcttccacaatcgcatcagaaagacgcatttccagatatgcctgcttcgtcataccggatgggatctgatatcgtgggtctacgcctgcccgctcaatctcttctctcaactctccaagtgtgatttccggctccacaccaagtacttcatttaaattggcattcgcatctgcatccgcggccagaaccggacatttcccactttcacacaaatactggatcaataatccacaaagagttgtttttcctacgccgccttttcctgatactgcaattacatgtcccatgtttttcctcctaaaattctgaacaatatgttgactttttctttaaatctcattatagttgttactatatgaattacaataatcaatctgtgagatttgtatggctactcaacacatcagaaaaattgttgagaaatcatatgataccaaataatacaggagtatataatgtcagaaaaaacgagaaaacaagatcgccgtacccgctataccaggcaaaccataaaagatacgttcttagaattgttagagcagaaaagttttacgaaaattacagttacagagatctgcaaaaatgctgaaatcaaccgtggcactttttatcttcattattacgatgtccatgatgtattatcagatatttttaatgatatgactcaggatatgttaacaactgtagatcatttattctgtctaaatcaaaaaagctgttcctatccgttctgtcagaaaatacagatggaatcacaatacagggcactgtttctggatgatgcaattgcccccattcttctggaaaaattagcagaaaatacaaaagaaggctatgtgacctggcttatgtcacacagcctcctgacctttgagcaggcagaatcggttttttattttcaaatgaatggctgcctttccatcaacagactgatgctccgcaatcactgtaatgactggcaacagattcagacaaccattgacaaatttatcaaagccggactggaaagttttctgatccatgatcagagggaagaaaatgcttccgataatttttgcagcaagatttctccgactgttactgcatcttctacactcagataatgatcggcatgatcttgaagaaatagttttccagatgcaggaaattcttcatccgcaaaccatatctttaaagttaccggatatcttggcagaactggaaaaacagcacacagatccgcctttgtctctgtgaattctgcacccagacttttacatgcttttttaattttttcaggatctttgccctgtaagagtttttccagtttctgctctgctgtccggtcaaacttggttcctcgaatcaatccatctttcaggttaccaaaagtaatgagcttctgtgagccttctgttccatcggccatgtccagataatgcagcaatgtcagataatgccattcgtccatgtttgagttcatacgaaactcagggagttgaatttcaatcgtttcataaaaactcagtacttcaagcacatttcggctgctataaaaaacagctccactttttgcagcaagatcctctccggaacgattttgcaaccgttttactgctacctgcaacatttcctgaaatgcacgattttctgtttgatttttgtattccataagctctcctttgtgaacatttatagtatcatgtaataatcaatgtttatacaaggattttagtgttctcataaatctaactttgtccggattctcttttatccattcctggacaaaactcattacctcagtcatagttttatagatttgtctacgattagcatattatacactcctccgtaagtttcattactgtgttgacttttcctttaaatttcattatagttgtaattatattatttacaatcatcaaaataataaatatgcacagtttctcaacacattaaaaagaaatgttgagaacttgaaatgttttagacaaaccagaaatatttttgtctcaaaaatgtgaaaaaaatcattatatcatactataaggagtttcttatcatgaaatactcaacaaaattaagtgatactgttcatgtaatggttctgattgctatcaaccaggaaaaatccctcaccagtgcctcaattgcagaaagtgtccatacaaatcccggctttgtacgccagcttatgttaaaactaaaaaaagcggaacttatgaccagtgtagccggacatgcccgtccttctctttcaaaaccagcagatcagattacattgctggatatttataaagcagttgaaggtgagaagccgctgcttcatttagatactcataccaaccctgattgcggcgttggcattaatattcagttatctttacaggaattctataatgaaatccaaaaaactgctgaagaaaaaatgaatatgattactttacaggatatcatagatacctattatcagcgaacatcaatcctcaatatctccccggttagccatcacggttaaattttcatcccgatttacggaaaatgttcctactatatccggttcaccttccttatgaccggattcaggtttcccataaatacttcctgcacagccggatcaggattatcaaatcctgcatctatggctatctgcatttctctgcgtacctcttctggtgttgtgttgtacttttctgcaatcttttcatttattatgagtgtagacatgcacagtttacgctttcatctcggtaattgaattgccgaggattcctgctttttatcctaaaaaattatacgggacagactttttcttctcttatccagaatatccgtctgtccagagtggcgaaaatgttaaagcagcctaatcgttctgttactgctgtcatggaagagatcggttattccaacattacgcatttttataaaatttttgagaaaaagttccatatgacaccagcggaatactgaaatactttataagtcctgtatgtgtcttatctgtatacagtagaaaagaaaaagccttataatattactgcaaatgatatgtccctcaaatatgatttttagattgactgttccttaaggggctatatcatttacgacaaatattataaggctttatatatttttacagtttcatagcactgcggatgcagttctcaatatattcttctcccaaatctgtattcaggctgagatcaaagtttccggctgcaccccacatacggcgggtgtaataacggtagttatctgcacggagtttttcatttttctgaaccgtagctttggcttctccctcggagatattctgtctctgtgccactcttctaattctgctcataagaggcgctgaaaaaaatactttcagacagtttccggaatttctgagaacgtaatctgcacaacggcctactatcacgcagttgccttttttcgcaagattacgtacaacctgacattctgcctcgaaaattttatccttcggcgcttcatcctgcatatccgcattcagatacatctgattaaccagatcatagatgagactgtttgtcatgatctcttcgtttttcttgatgaattccggtgtgtatccggtggttcctgctgtcatctggataatctccgcatcataaaaatcatatcccaacttttctgcaagaatcttgccaatatcgtggccgccacttccaaactgtcttccaatggcgataacattttttccataggttcctgctgtctgttcttttgcttcgttctcgttttctgcagatacgctttccaggaaaatcatatctttcaggaatacaagtttcttaccgatgagtctggcgataaagcctaccagaagggcagcaataacggtaccttctcttacaccagccagtcttcctgcaaatacgaaagaaagtacagcagcgatcactgacatggatacatcaaaacagatcttggttgttccgaaatttgttttccatgtaagaacaatagcacggacaaaagattctcccggaagcatgacaacgtctgccaagacctccatatatacacctacgccaagaatcagacatccgatgagaagatatacaatcttcatgatgtacgcttccggattgacccaggaaaaaagaatcatggtaagatcaataaaatatccaaatatgatggataccggaatctgaaggatgtgctccaatttaaagttctttctcaggatgatcaactgcagtacgatcagaaagatactaaaaaagatggtaaagtttccaagtgtaaatggaaaattaagacttaatacgtaaggaattgatgaaatcggggatgttcccaggtttgcctttgtgatcagactgactcccagggagtttacaaacaatcccaccagaaatattaaatatcgttttagcttctccattttttatttcctcctcatttcatattattttatcgtcggatcatttcatatctgcaagattttggtagattcggcaaaaaatatccataaacagcttctgctcttcttcggaaataccatttaatgcagttttttctattttcttaaaagcctcctccacaagcttctgatttttctttccggattctgtcataaaaatatgaaaagtacgacgatttccattgagcatttttctttcgatcagacctttttcttccatacggttcaaaatggacgttaaagatcctgcctcgatgaggcatcctgccgcaatctctttctggctggcaccatcgtgatctttcaggtaatccaatactttgggctgtcccaaggtaaggcctgtgtctgccagctgttccattagttttttctggacagtcatatggtttatcatagacaggtagtgaaatgaatcatccatttattatttagctccttcttttattatataaatagttataattcaaacatttggaattataactatatttgtggtgtatgtcaataacttttttagtatattggaatcttgtacaatgtattaccctcttgagaatatatagtcagtgtctttgtttcagggtaataccatgatattagctcagattaaatcgtaattgatacctcatcagcatttttcttttttattattgtaaaatatttttttacattttagcactattttcctcttctatttgtttgcaaaaaaagccataagattttcttttcaaaaccttacagctcttctatcatgttgcatcccaaacatcatctatatttacatgtaatcctgagcgagagacacctaaaaatttcaacatcccggagacggaaacccggcgtccagcctttttggcagcttccgtcttctcagacacttcaaaataaatgacttccgtcattttcccagaatgttgattgctttttttaacacatcaagtgcatcttgggcatcacgtaattcacgtctgagacgggcaatttccttctactcatcagatgcataattaccagaaccccgaacaggaatatcacctgattcccggaagtctttcagccattttgttaatgtactgtatctgatgccaagattttctgcacatccacgtactccgagatctttgtgatcctgatagtactggactacatcaagtttaaattgtttgtcatgttgctttaccatatgagatcctccttcagaatgcctctattgtatcatgcttatgtgtatttggaatttctcattttggcttgtactatttatattctagcaccactatctgaatggtttacataaggggatgttttattacctgtaccttttttcagatctttatgatcgaagcatagccggccacggaagcatccagtgcctgtccccggaaaaaaatgaggagaaggtactgtaagaaataattgactcccttaggagtaaatatgtagtagcaataattcatacctttttagctgtattttgtatcgtaaacagaaagaaaatgcactataatccaaggcaatgaaagtacttaaaaaagtagtttcgttgccttggttccatttttagaaagaataatacttaggtggaaaaattcccaggcgctgtgtggagttttctgtaagaagccggggacagaccgcactgtttcttgaaaaaggaagaaaagtggtgagggtctaagaacccaagctgtgtggagatggcagaaacagaaagagtggtgcgacttagcatggactgggccagcttgcacttctgggacaggtaatactggtagggagcaacatgatatacctcctggaacaggtggatgagcctggagcgggacagggaaacggtatctgccagatgatccaaggacagactttctgttaagtgcatatcgatataattgcggatcgccagtgcagtaggattgatgggaactttgtttgccagaaaatccgcaagctcctgaatatattgatggagcagtacagccagcttgtcagcagagtgtacagggtcggcggtaaaggcatcaaggatccgggtcagaggtgtttcgttatggaagcggggaatcagggtgacaccgtctaagccgtaatcggagagaagatgctgtaccagactgccgctaacattgaaccagatcttggtccagggatcaactttgtctgaatagtagtggtggtaggtgccggcagtaaggatataggcatctccggcatttacagtgaggatactgccgtttcgctcgatatgtccacggccgcttaaaacgtattcaaacacacacaggggtctgcgataaaccaggatctcataggcaggatccgggtaagtgataccggccatggtgggagaaaagctttccgcggtagggccggtgtagacaacgtatttttcaatctgtgtgcgtgtaatttcctgaggcatggtggttcctccattttttgaaagcaaattgcaataatgtaataacagcattgtagtaaaaaggagcaagcctgtcaactatggctttcaccatataaaataaaaatgaaatcaacccaaataaatgatcacaggaggacaaaattatgacacaaatacccagaccggagcatccccagccccaaatgaagagggagcattggaaaaacctgaatggagaatgggatttttcctttgactttggatgcagcggcatagatcagaaatggcaggaaggaaagacagattgggagaagaagatcctggtgcccttctgcccggaaagtgatctgagcggaatcggctataaggactttatccccggcgtatggtatcaccgcaccatcacattgacaggggaggagctgaagggagatcttctcttacacttcggcgcagtggactatgatgcaagagtatggatcaatggagtagaggcaggcagacaccagggcggttatgtttcctttacgtttaatattacaaagcttgtaaaggaaggagaaaatgacattacgctttttgcagcagatgatgtgagaagcggaaagcagcccaagggaaagcagagtcatttcttctactccataggctgtgattataccagaacgacaggtatctggcagacggtatggcttgagtgggtaccggaaagctacattgaaaaagtgcaatattatccaaacctggcagaagcaactctgggaattaaggcggtagtaaaggggcagggcacactggaagcaaaggccttttatgggggagagccctgtggcagcgtaagcgcaaagtcagagggcggcaccgttaccatgacacttcctttgtcccgtctggaaaagtgggagccgggtcatggcagactgtatgaccttacattaacctatggagaagataaggtagaaagctactttggtatgcgtgaggtaagactggatggagagaaattcctcatcaacgataagagcgtgttccaaagactggtgctggatcagggcttctatccagatggcatttacacagcgcctacagaggaagcacttgtcaaggatgtggaactgtccatggctgcaggcttcaacggcgcaagactccatcagaaggtatttgagcctctgttcttgtatcactgcgataaagcaggctatctggtatggggcgagcagggctgttggggactggattacagcaatcccgcagcattaaaatatttcctgcctgagtggatggaagccttggagagagacttcaaccatcccgccatcatcggctggtgtccgtttaatgagacatgggattatgagggaagaaggcaggatgacagcttactggccaatgtgtataagatgacaaagctgtatgacaccaccagaccctgcattgataccagcggacattatcatgtggtgacggacatctatgacttacacgattatgagcaggatccggcaaagtttgcagcaacctacgagtcctttaaacagggaggtgatttggaagataatcatggctacaggcagacacctgtaaagggtatccctaccttcatcagtgagtatggcggtatcaagtgggacgaggaaggtgttgaaaaggatggctggggctatggtgaagttcctgctaccaaggaggaattcctgaaccgatataagggactgaccgatgcccttttggacaatccccatatgtttgccttctgctatacccagctgtatgatgtggagcaggagttaaacggtctgtatacctatgaacgtaaacccaagtttgatatggatgtgataaaggcaatcaatgcccgtaaggcagcaatcgaggattaaaagcatcccgcagagtataaaagaaagcgtgtgagagacattggggtctgaccctcttacaattttcttggtgagataaaaaacaagtgcaaaacttttaaacgtatagctataaatgagcaaatttgaaaaactgtacaaacaaatctgctatacacggacattaagaggattaaacaatttattgtccgcataatgtattcccgcaaaagaaaaatccgggtatccaggcaaccctcagaaggttgtccaaatacccggaaatgctttactttaaggctatttacactatttacttctgtacctttgacatcaatactaccgtctcgacatgtgtatcactgtccaaactcatttccatatcttcctcaataatcggaagcttgaatttgatggatttgagccactgaccgtttggctgtcgttcctcatagatatggatttcagaaatcagcgattccataatctgtcgcttctcctgctcgtccatgacagcgtacagcttttcaaaataaatcagcactttgtagatattgtcagcagtaagtttttctgcttctattgccattttctttgctctggcttcaatcaacagattctccgtatcctctatcttatcatacattttataaaggcgatcatcaaggtctgctttacgcttgatgtagtgcttatcatctgggtcaagggtatcaatctcatcaatcaaacgggacttcgtagcatagctctgacgaagctgtttttcataattggcaatctcctgttcaatggcggatgtatctatcttcatattgattttttgctgcatcatcgccgcaaacttcggattgctgaccagtttgataataacctctgcaacagcaccgtccagcaattcctcattgatttgcttcttgtattcacacttatgaccacgggtcatagtgcggtgtttgcagccataatagaagaaatccttatatttcgtgccgtccggcttgtgcttgatgcttttgttgccgtacattccggctccgcaaataggacatttaagtaatccggtcagcaggtgtaccttgttgtctttaccgttgttgaccttttcatacttcttcgcctgagcaagaagttttacttgggcttcatgccagagtccttctgatacaatggcttcatgcagaccgtcaactaacagataattttcctgctccacaagtcggtaatcattgcgagttccatgtaccttttctgttcttctcctgccgtaagcaattttaccacagtaaacgggatttttcaaaattctgcgaatcagggctgcatcaaacagaggattttttccattctgccgctgaattttgttgataccgtgattggcaaggtatttcgcaagtccgttagctcctatatcggtatgcacatactggtcaaagataatgcggattgcctcggcttcttcctcgttgatatacagcatacctttttccaatttgtatccgtagggagcaaaaccaccgttccatttaccctcacgagctttctggattctgccttccatcgtctgaacacggatattctcacgctcaatctcggcaaccgcagaaagcacggaaatcatcagcttaccggcatctttggaagaatcaatgccatcctccacacaaatcagattgacatcgaaatcttgcatcacctgtaaggtagacagcacatctgccgcatttctgccaaaacgtgataacttgaacaccagcacataggacacgccatctttaccggacttgatatcctccatcatgcggttaaattccaatctgccctcaatggactttcccgatttaccggcatcctcatattcaccgacgatttcaaaatcgttgaactcagcataggctttcattcttgatttctgagcatccaaggagtaaccgtctacctgaacggcagtagatactctcgtataaatatatacttttgttttttctttcatatcgccatcctcatttgtgccacagcctgtggcataattcagctttcatcgtctgttattttttgccgtcagttttctgttccaacatctttatcgaatttaaataatcattttccacgtcgctgagcgttcttgtcttatattttcgatattctccagtcgctttatcaacagcctgcttatgagtaatgcttccatttccaattaaaagctgctctccactcatggtaagaatgcgatccagatgctctgcccagtcctgcatcgtcattgcctgttcacgctctgcctgacgttccgcaaaatccagatacccggatacaagttgtcccatagcacgaagctctttctcattcagatagtttttcgcaacaatcgcttctttgagtgtcggctgattaccggcaaaggtggtaagtcccatgaactctttttccgcatccgctcttgtataaatcacttctgccgcagtctgtccgtgaatggcataatgaattttattctgaacctttttgaaaaaacggatagagatttccgctttcgggtcgtagtcaatgctggtggcatagatttcaagcacctgacgataaaacaccttttccgatgcacggatgtctctgattctttcaagcagttccttgaaatatccaccgccgcccagatttttcaatcgttcatcatccaaagcaaaaccttttttcatgtattctttgagaatgttagttgcccagattctgaactgtgtgccacgcttggattttacacgatagccgacagaaatgataacatcaagattatagtagtcaacctgataggtttttccatctgccgcagttgttgcaaaatttgcaacaactgactctcgctgcagctcgccttcggaaaatacattttttatatgtcttgaaatagtagatttatctctctggaacaactctgccatctggtcaatggataaccacacggtatcctcatcaaatgtggtttcaatttttgtcaatccatcttctgttgtgtaaataatcatattggatttttgattcatatcatcataattgttcaccggaacacctcatttctaattgtgcaacggggtattgcgcttttattctatgtagctctatgcgttgagaacagtagctctcgcatagagtttggacacttattccacgactattatatcattgcttttccatcaattcaatagtgtcactgggttcttcagatgtgttttcttcctccaaacaagacggcggctctggaagattatcaatatccagaaccgccgcatatttttctattaaatttgcaagtaaatcggcaaaaccattccatttatctgtcaatagtgctctcctttctttttcgtccacgttcctgcggaatgtcctgtttctcttttcctctggtcaaaacggcattaagaaaagcccgtaccctttcaggtgcgagcttgacagcatccagatacggctgagcctgttccagaagtttctcatatcgttttttccataccccagcatctttcttggctgtttcatatttctgctggtattttaatttctccgctttttcagcaaagctgctgacagcataatttttgagagtacggcattcatcgggtgtcaagacgatgttcccggtaaaagatttcttacccatcgactccagctcctgaaccgtcaccgctattccggttgccgccttagtctgtgcttgcagggatttaagctcctgctttttcttctccgcagcctgtgtagtatcgtcaagctgtgcttctttctggttcagttccgccgtcacagcttccagtcgctgcttttcctttgccaccttaaactgggtcacagtcagatgttcctcggtgctgtcacgctctccacgttccacatcggtatatccggcagctctcatgtgctgaaaaaaatcatcctgtaaaacagaataggattttcggagaacaggcttaccattgacttgcagaattggttttccatctttgtccacagcaggtttggacagccactttttactgcggctgacctgcataatggtttcctttaccgttcctctgagagcttcatccttgcagcgtttcgaccacaaaatctgtttctccaccacagggacatagaccacatgaagatgataatggaacacgtccttgccaagtgcttcggacatcgcccggttaatctcgtcagcgtgcatgactgccgagaggatatactgttcaccgccaacaatctccacagcggatttataggcttcctcataaaactgtctggcgtattcataaccgccgtgattgtcgaagtacgcagagttcacatcaaagaccatttcgttgaaatggacggcatccgccttcagacctctggtggaaatgatgttgtcagctttcatctgctcaaacatttcagcgtagctcccggtaggttctttgaagtgtacgttgagggaacttctttccgggataatatcttcgttactgtatatttctttttcacgctcattgtgtgcctgtgcatctccgatgtcattatctgtgacatccatatttcttgcacaggtacggtcaactccgtcatttcttgccatatttttccttcctttctttgggatttgcagacaggtagctttggaaaggcacttctgcggaagtgtaataacccactatgacactttcatccatactggctgcaaagtgccgtgggctctcccgaggggctctccgagggtaatgcggtcgctgcggcgacctctgccgaacatcagaaagttgtctgctcctctttccaatgtccggcacggacggctgctgttttgcgaaaccgccccgtccgttgacagaaaaaagactgactttttcctgtcatttgggtacgtcacgaaggttttatacaggagtgatttacgctcgtacgctgtgtacgtacgtaccaaaaaatcaatcccgccattcctccggtacgtacgtacacggcgaaacgtcgtaaaacccatttatattcggacgggctacggcttcaattcccatgaatccccacaccctgcgcccggcagagtttgtgattttgttggtgtgttccagattgtagcgacttaaatttgccaccacactgtcactaaagctgcgggatttcaggggcggcagagaattttcctcacaccacatccgataaatttcgtacagctccttggagctgatggaagcatccgctttcagccggatatagccctcagactccatgaagtcgaaaatattgttgttgtcacgcttgacggactctcggttggttttggtgcgctcactttccgtgaatttgaaattgttggcaaccagacgctgcaatccctcaaacgcccagaggaaaatgccctccacctcagctttcatcttctgggcgaggtcagggtcatccattcttccggcaggcttttcctttgtggtcagcacaagctgtctgcggtagaaaccgtcacttcggtcatacaatgcctgtaaatctccattggagaaagccagcagacgggcgaacatccagccctgatagctctgtttgcccttgcgctccaaatccattttcccttgagctgtcacaatggatttcacataattggtctggcgcaaggcttccattcgcatatcatcatccacgcataggaggatatgctccagatcggcacgggcaaatcggttctcagagattttaccaatgcttccgtccttcatggaactgcccagcatttgccccagcaccgcaccgatttgggatttaccctcgccgccattgcccttaatgaccatcatcctctgtcctttattggagggaatcaggcaatagccgataaattcctgcaaggtagggatgtcctccgggtaaagcagaccattcagaaaggaaagccacagcacaggtttcggagtatccgggcgatagaaaaccgggagcctgtttctcacaatatccggcttcccctctgtaaaagtgccgtccagcatgagcgtaccgtttgccagatgaatcctgtcctgctccggcgggaagtcctccacatgagccgccagcttcataatctcaatgatgttgctgattttgcggggaatgttgttcacggcacaatatttcaattcttcaaagatttcgccacgaagcggcaggtcgtccgtcactcgaccatcaggtgtgaaaaaagctccgtttgcaaagataatctgacgggttctcagaaaatcttcacaaaacagagcttcattgatactcttgccgtcaaaccacatcggcacattcatctcaagcaatttcctgttctctgacatggcagcgcacctcctttttctgctcgtccagtcgtgtttgcattcttgcaatcgttccgtctgtcaaaagttccttgacggtatcagtcctttcttcctgatcgctcataaggagcaaatcgttcagatactccacatattccagcttgtggcaagcttccacgaacctctcatccggctcgtcctccggtgcttcgggagcatatcgctctttccagtcctccaaaagatgaagatacccggacagcacattcatgcagaaaagctcgtcctgtttcgactgattcacacggggacggtacttctttacctgtgccaccacggacggcggcctgtccagtccgaaatccgcagccagtctctgcgctgcttcataggcagacaggtcaagcagccttgccacaaagtcaatcacatctcccttggcaccgcagccgaagcaatagaagtaatcctcgttcagcttcaagctggggtgtctgtcatcgtggaaagggcagcaaatcatcccggagcgattgattttcagcccgtagtgttcggcggcttgcctaaccgtgaccgccgccttgactgtttcaaaaatgttcatttgcataacctccttgatttttctcgatgattttttcatctgcctgaatatacgcagaaaaacgctttcaaccgaaaaatcaggcacttccgcaagcaaagcaaaaagccgccccgaaaacttgaaaaaatgcaagtttcgagacggcagtgttcacacaaagttggttgatattgttccgtaaatagaatataattgaagttaatatgaatcaggagggatgatacagaaatgaaatacctgtctacatttgaagttgccgagaaatggggtatctctccccgaagagttggtatcctctgcaacaatgaccgcataccgggcgcacagcgggcaggaagccgctggatcatcccggaggacgctgaaaagccgacagatgcccgcattaaaagcggaaaatatatcaaacagaaaacagacagaggggaggaagcataatggctgatacttatttacccgccgatgttcggaaaagaatcgttgatgtaatgagagaacgcaagatgacccagcgagaactggcacttcggattgatgtgaatgaaagcaccatcagccgcttccttagcggaaagaccgaaaagctgagcgaagaaagcgttatccgcatcgccagagtgttcaatgtgtccacggactttatcttgggtacgaccgtaatcccggataaaaagaactacgatatttcagaactgggattatctgttgaagctgcaaagaatctttataccggaaaggtcaacaatgatgtagtcaaccgtctgctggaaaatccccgctttgccatggttacttatatgattgcacagtatatggatgatacccttgcaagaggatatgccgcacaaaaccagatgtttgctaccgttggctctctgctgttgggacagaaccaagctcccgaagcagtacaggcagcccgaaccgctaatgccatgaaaattcccgcttatcaggcagaccagaccacgattcaaaacacctttatgacggtggttaaggaaatcaagaaagaagcaggcagcgatttggtcgcagccaaggcaatcagcaaggaagccaccgaaaagatgtttgccgagctgaccaaggggcaggatatgcagaatccgaccatcacgccggaagcagttgttgatgctattacaggcagcatttccggtgtcgatggagtcaatcaggaagctctggacaactttaacaaagccttgctggggctgatgcagacgatggtgctgccggaagatgatggacaagataactaacgagcagctctgtattgcggcgcagagcggtgacaaatgggcagaaaacgcccttgtagagaacaatctgcggtttatccgaaagacggcatacgagatatggagcgcacagcgggagctgaacgttgccctcggcattgaactgaacgatttggtgcaggagggttcattggggcttctgggctgcataagcagctttcaacccgactacgggaacaagtttttgacctatgctgccccggctattcataatgccatgctggactacatccgcaggctgaatcctacctttgaagccaaaaatctggactgtatcattcgtctggatgaggtcaaaaagggcgagaataagggacaacatgaatttatagcagattccagagtacagaacccagagcagattttcattgcaaaggaaacccacgaagaaatccatacggctctggaaatgattgatgagcgagagaaagcctatctctggtatcgctttggctttgaggacgatgtcctccatcctctgagcgaaacggcgaagcacttccatctgtcagagagcagagcaaagtccacggagaaattggctctggataacttctggctggaactgccttggtggtactaaatattcaaagaaagggacatgtaatcatggaaaaatataaaatactcatcatcgaagatgacccaatcattcaaactgaattacaagttctgttaaacggaaacggatatgaggcatccgcagttactgactttacatcagttatgcaagcggtcaaaaatactcatccctatttgattttgctggacataaagctgccacaagaaagcggctactcaatctgttctcaaatccgcagtttttccaatgtaccgattatctttgtaacaagctgcaatacggacatggatgaattgaacagtattttgctgggtggagatgcttttatcaccaagccttataacacagcaattctgctggcaaagatttcatccttgatgaaacgagcttacccgatagaacaaattgagcgtctgaattggcaaggagcgattcttcacttagaaagtagcacgattgaatatgacggtaaccaagcagaactgacaaagaatgaattgaaaatattatattatcttttcaaacacgcaggaaagatttgttcccgtaatgatattgtagattatctatgggacaatcagctatatgtggatgacaatgctttgagcgtcaatatcaaccgcatccgggaaaaactggcgggcattggcctgacggattttatcaagacaaagcatcgccaggggtacacgatatgaacagcaaacggtattggaaaaacaggcttccatttctgctgacgaaccttgtttgcatggctgcgctcactgtatttttgctggtgtgcggcaattcggcttccgcagtagtattgatcctgatcgtatgggcattgattttgctgatgggacttgtcctcacttactggaaacgaaagcggcagatgaaaaaacttctggatatggcgaagcagctctccgagagataccttatttctgaagtgatggaactgccggaacaggccgaggatcaggtttactatcagattttgaaaatggctggaaaatccatgttggagcagattggggaggtcgagcgggaacgcctggagtacaaggaatacattgaacaatggattcacgaaatcaaaacgcccattactgccatgaaactcctatgtgaaaaccatcggacgaactggacaaaagaacttctgctggaactggaaaagaccaaccgctttacggaacaggctctttattatgcccgcagtgagcatacagagaaagattattctgtccgggaaatggcactgtcccaagtggtgcatcaggcgattgcagataacaaatatctgctgctccaaagtggtatgcgcctggaagtggaggaaatgcaggatacggtttattcagatgaaaagtgggtgcgttttatcctaaatcaactgattgtcaatgcggtcaagtatcgtacgaagcagccggttctccgcatttctactcataaatggcaggatcaggttgtccttgtcgtggaggacaatggaatcgggattgctgcgtccgatctgccccgtatctttgaaaagggatttaccggtcagaatggtcgtctgattcagcagtccacgggcattggtctgtatctgtgcaaacggctctgtgaaaagctgggcattggcattacggcggagtcgtcggaacatggcacagccatttccctttcttttcacattaactgtctgattcatgaagtgcagaactgaaaagcgttctgcacttcttacatttttgttagaactttgtaagaaaacttgatacaaacgaagccactcttattttacaatagagatcagaggtgataacaatgaaagaaattttgaaactggatcatatccaaaaatattacggaaatggcggaaatgttacaaaagcaattcaggacatcagcttttccgttcaagagggagaatttgtaggaatcatgggagcatctggctccggcaagactaccctgctcaactgtatttccaccattgataccgtcagtgcaggacatatctatctggacggaaccgatgtgacggaaatcaacgaaaaacagattgcccggtttcgtcgggagaatcttggatttgtatttcaggattttaacctgctggacacgctgaccatttcggaaaacatagccctggcgctgaccatcaacaaggttccagcaggcgagattgatgggcgggtgcgggaaatggccggaaagctgaatatcacggatattctggacaaatacccctatcaggtgtccggcggccagaagcagcggtgcgcctgtgccagagccattatcaatcagcctaagctgattttggcggatgaacccaccggtgcgttagacagtcactcgtcccagatgctgctctcgacgatccagagtatcaatgaagatctcggagccacgattctgatggtgacacacgatgctttctcggcaagctatgccaatcgtattctctttatgagggacggggcaatctttacggaaatccgtaaggggggtgattcccgcaggactttctttgaaaaaatcctggatgtccttaccatgatgggagggggcatgagcgatgtacgctaaacttattttcaaaaatgcaaagcggtctgtgaaggactatttgatttatattgtgaccatgacactctgtgtcaccctattctatgcgtttttgtctatcagcagcacccattatcatccgaccattggtgcggaatataatatttccctgctggctggaggtatgaaactggcaatttgcgggattagtttgcttttgttgtttctgatccactatgtcaatcgtttcatgctgagaaaaaagcaaaaggagtttgccgttgaggcaaccttgggaatggagcaaaaaaccataggcctgctcttttttggagagacttttttcctgctcatattctctgtgtcggtgggaatccttctggggatggtcgtttctcaggtcattacggctatgctgcttgcttcttttggggaaccctacgctttttcttggtcgtttttcccggatactgtgctgttgaccgtgggcttctttgttgtttgccagattctggttggagtcgggaatgtcagaattctcaacaaaagcaggattattgagcttatgacggcaaaccgtcagaatgaaaaaccgcttcataaaagcagatggatgccgatgatctgtattttctatggcattctgctgctgtggatgctggaggtaggtactgtaaaatatcatttttacttcgattccagacatccgcttcctgtaaagctcatgtattgggggaatgtccttttccctgcactgacgctgctttgggcaatcgcaggtgctgttttacacagaaaaatagggttttcccgatatctttgcggacttctggctggtgctgtattgaccgctatcccgattttttccatcgcagaactggaaaaagcctacttccttggatttgacgctccaactctgaatcaatatttgctgtttggggttgcggatattttgtttatcatttccgcagtcatgtatttatcgaatgcggcgctcctatactggaaggagtctaaagtgtcccgcaaatatcataatacgagtttatttctgtttggacagctttcctctaagctggctaccaatacgaaaacgatgacgatcatttgtgtgaccctgactttttctatctgcttgtttgtcattgcgccggttttaacgggatggagtctgggctatttggacagtcgggctgtctatgatattcaaatttcaagccgctacaacgatgtttatgaagtggaaaatcttccggatacagactatggagaaattactgcgttcatagaacaaaacaaaatagcgataaaggacgatttgactttttcggaatatcttcccaagcaaagcgactttcaccagcgagtaaagtacaattttcctcccttggcgatcgcactgaaggattataacgctgttcggaaaatgttgggatatgaacctattatcttacaaacggatgaatttgctacccactggcatcgtgcagcagaggacaaggatattgaaaactacattgctgagcataccttattggaaactgacgcaggcaccctgaaactcagtgagaacgccgtgtttcaggagcctgtgggggaatccatctataatctttatacagatgtggtgtatatcatacctgacgaaatagcgcaagtcttgcttccggtacagcgcaaccgatttgtgatgacccaatatccgcttcccttcaaaacggcagaaatgctggaacagcttcttgggcgttcttatccagaagatcctgataaagacaatctggcaggatacagtacaactgtccatactacggaagtgaaccgtataatcgcccttaactttatcctaaaagcgtccttgatctatggtgcaattgttctgatggtgatgtgtcttaccgtgctggctcttcagcagctcctggatgcagaaaaaaacaactacagattttcggttctgcgaaaaatgggagtggaagagaaggacctgcatactttggttctaaaacagcttggtgtttggtttgggatgccgatcacagcggcaatcgttgtagcaattattgtgattggctattttcttcaaagtgtttctgctgaaatctcagcttatattggctgcggagccttgatggtacaagtagggattatcattggtattcttttcttactgctgatatgctacttcataagtacatggatattgtttaagcggtccatttcggagaactgataaagtcacagtacaaaaaggaaaagccgcctgtatgagcatttgatatgcccgcacaggcggcttgctttatctctggtaatcagtccaaaggtttatattctgtaacagttttcaggtatgtttccgggtcgccgttgagaactaaatctgcataggctgccggatcgttgtaaatcagccagtccagctctgaccgctgatatatattatcggcaacctcattctctaccgcaatcgtatcaatggcaatcatgctgccatttgcaaatttcagctccacacaggcagtatccatattgaactcacaagaaagtaaacgcttcattttgccctccttagatcatgccgaagtgcttgagcgcctccttgattgctttttccttatcgggcgggcattggggctgttttgcatcatcggacttcggtttgttgtaattttctcgctcgatgataccgcatttctgcttcacctgagcgatatacaagctgctgaccttgagtccggtatgctccagcacatattccttgatttccgaataggtggctttcttctctgcatcggtgagatcaagttcgtccatgtggatgtctacctcgatatgttgctttgcattaagtttggacaataaacataccgtctcgacatgggcggtgcaagagaacaaatccatatattatggaaagaaaacttttaattttgaagtgtagtagtcacctggtagaacccgattaacgattatcaacaaggggtgcatacaatatatacccgattaacgattgcccctacattcccgaatttaaagtcgtttatttgtagtctcctggtagtctcacccccggcggacgccaaattatgccccagtttgccccattattccgaggattgcgagtagtcatggagttctgccgtggcagatgaaaaatatttttatcattgttttatttctccttgatttgcccggaaatgccctgttttgcaatggatttcggggatttgtgaaatgtgtgttttagctgccatcttggcaaaatggggcaagattaagcaagttattgcgtgatcttatcatttccaagcagaataccaaacagagcatatcccagcattccagcctcatatcctgtcagtgtaaagggaaaatagacatctttttcttttacaagtttacaaagcagccttcctgcaaaaatcccacctgcggtcactacgaagaaggtaaccggaaatatcacagtatctgctttaatacttgtcgataaaaggtataaaacaatgagattggaagtgtaaaattcataaccaatgcctgaagtccttcaattctctctgggcggatcagttttttctctctgcagatcatcccaataataagcattatgatcacgggtaaaattacttgtaataaactcactattgttcagcctcccatacctgtttctcagcattccactgctactttaatcacaccatctctcttattttcgaacaattcatatgcctcttcaatcctgtttaacggataggtatgcgtaatcagcggttccgtgttgatcttaccttctgatatcagcttcagaatttcttcgcaatcgcagccatccactccacctgttttaaaagtgagatttttaccatacatatctgggagtggtaacatctgcgctttatcgtaaagcgcaaccactgtcacgattgcatttggtcgggcacattcccacgccagtttaaatgtcgattctgctccggcaacttcaaggactgcatcagctccaccatgctcactattagtcttaacaaactctttacagtcttccggtgaaacagtaagaatctccggataatgctcattaataaagcgaatacgtgtctcgtccttttcacatataatgatcttcgctggatttttcagcataacactaagtaaagtacatattcccgttggaccggctccaatgattagtacagtatcttcctctgtgatttcagaaatacgtgctgcccaataaccagtagcaagaacatctcctaccagtaaagcctgtctgtccgtaacaccttccgggattttattcaatccctgatctgcaaaaggaacccggacatattctgcctgtcccccatcgatacgacagccaagtgcccagccaccattcttgtcggtacaattgtttacatatcctttcttacagaaaaaacactctccgcaaaaggtttctacatttacagtcacccggtctcccggttttacatgcgtcaccttagaaccgactgcctcaacaatacctaccatctcatggccaactgtaattcccgggactgcacgcggaacacttccgtgtttaatatgcaggtcactggaacagatgctggccagtgtcacctttacaatggcatctcgttcatgcatgagcactggtttcggtttttccattagttcaaattttccctttgaaacatatgtataagtcagcattattttgcccccatctattagaatgtatactagtaaaatatccggtacggaacacatctgttcttataccggatatttctgattctattttgtatacactgttttacctcttgctattacctcaacaagctgcaggtcctgatccaggatacaaagatccgcatcatagccctcttcaatctttccttttccattaagacgaaggatttctgccggattggatgttattgttgaaagtgcaatttccaacgggatatccgctttaaacacacactctttaacttccttcagaaggcagctggactgtccaacgcccattccaaggaattcgccatcactactgtacatcggaaggcttccctgtccatcagaagaaattgtcatgcggttaggatttactcctgcatctaacatccgtttgataccattacatactcgtacctcatcacagatagtttcccaatagtcaatatcttcatttccggtaaaatctactgctccgcctttcagcgcatattccattgacttgcagaaaagcagctcatttcgattgatatgtgttggcaatatttgagaagccggtatctctgtctcatctaccacccgttcaataagatctaagcatctcggactgtcaccaagatgaacatttacaataccagctttcccggaaagaacaccaccaagtcttgtatccgcaacgacacgtacaaattcctcaaaagtcggctgtgaagaccgatgatcagagatcgcgatttctccagttccaatgatttcctgaatcatcataatatctttcacaatactgtcagtcaacgtacgaaccggaatctgataactgcctgtataacagtatgcagacattccctgctcattcaatccttttgtctttgcaaccagtgcacatatatcacgaccgatcccatctgttccaagacagccaacaactgttgttactccaaacttcgtaagtccttccatagttgcttctggagtacgattggcgaatccaccttcgccaccgcctcctagtacatgaacatgactatcaatgaatcccggagttaaaagtaacccctctccattgatcatttctgcctcagaaagaaatccgtctgcggatatagaacctggatctttaatcttaataatcttatcattgatcacaagtacatcttttttccccagatgttgtggagcataaacatcaatattctgaattaatttcatcataaatcactcccaattatccaatgcatgttttagaatccaattccaactgcaataagaactgtaatgattgcaccaatcattaagacgccaaggaatttccacatgaatttaatccagttagaccactcaatctttgcaattgcaagagatccgatcagacatccggatgtaggaacaatcaggtttgtaaatgcatcaccaagctggaatgcaactacagctgtctgtcgtgaaacacctaacaggtctgacagtggagccatgatcggcattgtgatcgcagcctgtcctgttccggatacaacaaagaagttaaatacggactggaacagatacataagtactgctgcaaccgctccggaaactccagacaatgcatttgaaatattatacataattgtattgataactgtaggtgtggtcggatcagatccaccaagaacctgcatgataccctgtgccatagcaacaacaagtgcagcaccaatcagatcttttgctccatctttgaatgatattgcaatatcatttagtttcatatcgttcagtttaaagataactccgatcacaccggaaacaattcccataataaagaactgtgtagcaatctccggcatgtagtatccttgagtcataactccccaaactacccatactactgtagcagccagtgtcagaagaactaaaatgtgtccaagaccaaatgaatgtccttcgtcaattcctgttttttcattctgctcacggaaatatgaatcagtcttatatgcgattgagattgtcggagtctttttgatctttgatgcatagaacatagtcattccacagccgagtgctgtaaatactacccacattaccatacggaatcctgctccggagaatacgtcaatacctgcaataccctgtgcaatacctacagagaatggattcatccaagatgaaccaaaaccaatctgtgttgcaacataagtaacaagaactgcgataactgaatcatatccaactgctacaaacaacggacaaagaatcatagtaaacggaagcgcttcttctcccatcccgaaaactgctccaccaagagaaaacagtacgaaaagtatcggaatcagtagtttttctgctccctctgccttacggatcaatccgatcaatccggattcaatcgcacctgtacggatcatgataccgaatgcaccacctactaccataagaaatgcgataatctcgattgcagaactatttacgattccgttatacatatagttaaaaaatcctgttccaccatctccactaaagagtgctactccttctgttactacatttcctgtatcatctgtcagatactggaaacttccgtctttgattactgtacgggttttctcaacaccattgatcatatatgaaatatcctgtgtttcgtaaaatccctttggtacaagaaatgtcataagtgctgcgaaaacaactacaaaaaagatgataatgtaggtatcaggcacttggaatcccttgttaaaagactttaacccttttccttcgtttttgctcatttttgaatctccctcccatttttcattaaacctgtcaatattatttttcaaaaaaactgctcttatttcctgcagcgtccaagtctgcctttaaaatcttcatacccaaaatcagtaagacgttccatggttttatcgccatgtctcagccatatatcaggcaaaggcattccattaaaggtattgttcttgcaggttgtataaatggccatatcaccaaacatgaggatatctccgtacttcaacggctctgaaaagctgtaatctcctatgatatctcctgacaggcaggttggtcctccgagccggattgtgactgcattttctcccggttcatctgctccaagaagaggaggacgataaggcatttccagaacatccggcatatgacaggcagcacttccatccaaaattgcaagccgggtatcaccattttgcagcacatccagaacagttgtcaaaaagaatcctgcatttaaggcccatgcctctccgggctccagataaacatctaccttccattcttcctttgctgctctaatgcacttctcaagccgtgcaatatcatagcctggtcttgtaatatgatgtccacctcccaggttcagccatttcatctgagaaatcagatctccgaatttcgtctttactgctgtaagagtagtttccagatcagaagagtcctgctcacaaagggtgtgaaaatgaataccatccaataatccgatcagctccggatgctttctcacagcagtctcccattgtgctcttgtggtacccatgcggctgcctggggcacagggatcataaatagcatgcccctcctgggtagagcattccggattgatccgaagccctgcacttttcccggcctccttcactctttttccaaagcgaagaagctgagaaggagagttaaacactatatgatctgcaaagctaagcagctcctcaaattcatcctcacgatatccggcgcaaaatacatgtacctcttttccgggcatctcctgggcaccaagcctggcttcgtacagtccgcttgcttctgttcctgtcaaatatggttccaaaagatgatagcagtcataattactgaaagccttctgtgccaggagcattttgcagcatgttctcttggcaatattccccattaattctgcattttttataagtgccgcttcgtcgagaacataacaaggtgttttgatcttccgcagctccggcggaataattccgccggacgctgcaaagggtggtcttgtatctgttctttccattaatccaccagctccggatcatgattttcgctgcgtggaagtccatatttgtcaagtgcttccaggaacggatccgggtcaaattcttctactgtgtacactcccgggcggatccattttccggtaagcatcattaatgctccgcacatagccggaacgcctgtcgtatagctgattgcctgacttccaacctctttataacattcctggtggtcacaaacattataaatataataggttttctcttttccatcctttaccccggtgaaaatgcagccaatattagtttttcccttagtacgtggacccaggctggccggatccgggagaagagccttcaaaaactggataggaacgatttcctgtccattatagttgatcggagtagtagaaagcattcccacatcctccagacagcgcatgtgatccagatagctctgtccgaaggtcataaagaaacggattctctttactcccggaattgtctgggcaagggactcgatctcctcgtgatgcagaagatacatatctttatcgccgacctgatcaaaatcatattcccgcttgatcgccatcggaggaatttccacccagtgtccattctcccagtagcttccgggcgcacttacctcacgaagattgatttccggattaaagttggttgcaaatgcatatccgtggtctcctccattgcagtccagaatatcaatggtatcgatctggtcaaactcatgctttaatgcatatgcacaatatgcctgggtaacacccgggtcaaagccgcagccaagaagtgctgtaagtcctgcctcttcaaatttcttccggtatgcccactgccaggaataatcaaaatatgcggaaaatcccgcttccttgcagcgtttttcgtaaatagcacgccatttgggatcatccgtatcctccggctcatagtttgccgtatccatatagtttacaccacatgccagacatgcatccatgatggtcagatcctggtacggaagcgcaatgttcattaccagatccggtttgtaactattgatcagctggatcagctggtttacatcatccgcatccacctttgcggtggtaataactgtttttgtttttccttccagtttccgggcaagtgcatcacatttttcttttgtcctgcttgctatacacagttctgtaaatacagtatctgcctgacaacacttttgaattgctacactggctactccgccgcagccgattacaagtactctgctcatgttttttgtctccttttttatactcaattctcgtaactgtttttattttgccaccgccagcagcagttccctgaccaccttacatgctgtagctgtggaaacaccgcttggatccagcataggtgccagctcattgacatctgctcccacaatatttaattctgataccttccggatagcagcaagcaattcaaggaagcttacgcctcctgcctccggtgtaccggttcccggaaatacagatggatccagacagtccagatcaatggtaaaatataccggaacctgcttcctggccaattcctgtacggtttcttccaggccttcaaaggtaaagggatgaaaatctgtatgctcttttgcaaaccggaattcttctctctccccgcttcggatacaaaactgatgtatccgcccatctcccagaatatcatagcatctgcggataacacacgcatgacttaaatgggcaccaagataatcgtctcttaaatctgcgtgcgcatcaaaatgaataatatgaagtcccggatatctcccggcgacagctctcacagcagccagtgtcaccagatgctctccccccagaagcaacggcatttttccctctttcaggatttcctctgcacgatcctgtatatcagcaagcgccttttcactgctgccgaagcaaagctctagatctccactgtcaaatacccggatatccataaggtcacgatcctgataagggctgtaggtttccagtccaaagctttcatgacgaatggcagaaggaccgaacctggctcccggacgaaagcttgtggtcgaatcaaagggagctccgtaaagaacaatttctgcttcctcaaagctgctgtcacaaccgataaaattttcaatatttggtaagatcataaatcagtcctccacctcctgaagcatttcctccagaaaagccggaagataaaatgcacctttgtgaagccttgtagtatagtaacgggtgcgaagattcagtgaattccatgccttcgaatccaggtcatccacaggatgatattttttacttgcaaagccaaacagccagtagccggcagcaaaggtaggaatatgagcctggtaaacacggctgatctggaaagtactggcaattcttttgtgactgcgctgcatggcatgcgcatcctcggaataaaaaggacttccctgctgattaaccatgattccatccgacttcagcgcattatagcagtttccgtaaaattcacgggtaaataatccctccgatgggccaaagggatccgaggaatctacaataataagatcatatttattttcgcagcggcgtatatatttcaacgcattttcataatgaaggtgcactctcctgtcatccagcctgcaggcatttcccggaagatatgcgcgacaggcttctactaccataggatccatctctaccagatcaatatggctgacacggtcatatctggtcagttcacgtacaactccgccatctcctgctccgatcacaagaatatctttagcttctttgtgaatagccataggtacatgcgtgatcatttcgtcataaataaattcgtcacgctctgtgagcattacattaccgtccagtgtgagcaccctgccaaattccggtgtctcaaaaatatcaattctctgatagtcactctgctttgaataaagctgacggtttacccggatactatgcttcacatccggtgtatgaaattccgaaaaccacatttccattttctttacctccctgccagtacgtttaaacgcaatatatccggatcttcagggcctgtcatattgcatccttttgccttggcatattcaatataatccaggatttccggagtgattcgttcccccggagccaaaatcgggattcccggaggataacacattacaaactcgctgcatactttgccttcggtttctctgagaggaaggctgcatttttctgcataaaaagcttcctgaggacttgtcactacctgaggatcgatatattcctgatccagcaatcctgatttatccttctggaatcgcctgcggatctccgcaagagcacttaccagccgctctatttcctgggcacgatctccgatcgacagataagccagaatatttccaatatcaccaaattcgatctgaatatcatattcatctctcagtatatcgtaaacctcgatccctgcaagtccgatatccagggtatgtacacttaatttcgtaatgtcaaaatcaaaaaccgaatctccattcaccagctcttttccaaatgcataatagccgccaatagcattgatctcttcccttgcatactctgccatatctgctacctgatgaaaaatctggcgtcctcgctgtgcaagattccggcgcgaaatgtcaagacttgacatcagaagatagctgcctgaagtagtctgagtcagattgatgatctgacggacataaccggcatgaacacctggtcctgtaagaagaaggctggactgggtcaggcttccgccgcttttatgcatggatacagacgccatatctgcaccagctgccattgccgaaaccggcagacctccgccaaaataaaaatgagttccatgtgcctcatctgccagacacagcattcctgcttcatgagccatgcgtacaattgcgcgaagatcactgcagattccataataggtgggattgttcaccagcacagccaccgcatttgggtgctccttaattgcctttgccacctgttcacgtcgcattccaagagaaattccaagtctctgatccacctccggattcacatagaccgggattgctccgcacagaaccagcgcattcagcacacttctgtggacatttcggggaagaatgatctcatctcccctcttacaagcagttagcaccatagtctgtactgagcttgtagttcctccaaccataagaaatgcatgcgctgctccaaaggcatctgctgccagctcttccgcttcccggatcacagatacaggatgacagagattatcaagcggcttcatgctgtttacatccacacctacacatttttgtcccagaaattcagtaagctccggatttcctcttcctcttttatgtcccggcacatcgaaaggtactactctcatacgcaggaatttttccagagcttcatgaattggagcatgattctggtccagtttaaaacgacttctgttcattgcttctccatttccagttcctttatccgcacaaaaaaagcaggccgatacaaaaccgtaaacctgcttagatcattcttcctgattttattttcatcgcatataaatatgagaatccccatatttacatgagatcagaatccggatgatatatgtcagagtctatatagcaatcatacttttactactcttattgaccgtttcacaagtctgcgcaacatgcgcatgacggttatcaaaggaaccaacttataaaatttgagcttctaactcaatcaataaggcaaccaaagttaccatcagcggcagtggacccggctgtccgtatggccttgaccccaaaatggagtggtccaaaataattgctttgaaaagactctttcttgtccttcaaaatctacataagcatagcatatctgaaaattcatgtcaactatcaaaatcgtttaaatacttatagtatggaccatttataataatgtcagaaggatattcttttcttgaatcccttatattttcatgctaatatatataattaggtcaaaaactacaaaatacaaaatggaggaaatatgaatcaaaaaagtacatctgctcccatagcagaaaacaaaatggggaccatgcccgtaggaaggcttgtactaaacatgtctctgccaatgatgatctccatgctggtgcaggcattgtacaatattgtagacagtgttttcgttgccatgctttccgaaaatgctctgacggcagtttccatggcttttccactgcagacacttctgatcgcagtaggtgcaggtaccggtgtgggtatgaacgcactgctttccaaatcccttggagaaaagaattttgaaaaagctgatcggacagccagcaatgctgctttcctgtatggcttaagctatctggttttcctgatccttggatttacagtagtaaaaccattttatgccagccaggtacataacgcagaccctgagatccttaaatttgggattgaatatctgagcacagttatgatattctcctttggtctgcttggacagtttttctttgaacgtctgctcacatccacaggaaaaaccatattcagcatgacttctcagctgtgcggtgccatcaccaacatcatccttgacccgatcctgatctttggtctgttcggtgctccgaaaatgggtgttaccggagctgctgtagctactgtgatcggacagtgtgtagcctgcatcgttgccggaatctgcaaccataaatttaatcatgaagtccggctcagcttcaggggcttccgtcctgaccttaagatcatcggccatatttatgcagtaggtattccatcgatcatcatgcagtccatcagttctatcatgacctactgcatgaatctgatcctggtacagttcacagtcactgcaactgcagtatttggtgtttacttcaaattgcagagttttttcttcatgcctgtatttggacttaacaacggcattacaccgatcattgcctataattatggtgcacgccacagaaagcgtatgcttaaaactgtcaaagtcagcatgttcatcgcattctgttttacattcattggttttcttgcctttgaatttattccgaaaacactgctggggctgttcagtgcttccgaagatatgcttaccatcggaatccctgcacttcgtatcataggaatccactatctgatcgcatggttctgtatcattgcgggaactgtattccaggcactcggaaaagctgtattcagtatgatcgtatctatcatgcgtcagctgtttgtcctggtacctgctgcttatatccttgcttccatcggcggacttcacgcagtatggtggtctttccccattgcggagatcatttctctgatcgtgtccgtagctttcctggttgtcataaacagaacgatcattcaaaaaattccggaagcctaaggacatcaaagcttcccattccaatttatacaaaaagaagacagaagatttccttttttctcttcaggatatcttctgtcttttttattgttatttatagatccggtagccatcccttccggagcgttttacctgataaagggcaaaatctgctttttgatacagttccataaaggtatctccatcctgtggtgcaaaagcaattcctgcactaaaagtaaatgtatgctctcccatgccttccatacggatctccctgagcttttcatgaagtttttttattctgctctccatattttcccgtgaaccgatattacagagcaggatcacaaactcatccccgccgatacgcccgatcacatcctgttcccggaactgctctttaagaaaacctcccagcatttttaatacattatctcccatgacatgtccgtaaacatcattcacttctttaaaatgatccatatccaggatcaggaagccatgaaagccttccggagctttttctctcagaatagcatcgatcaccttctgcgtattctctctgttataaacgcctgtaagcgcatccttctgggcagaacgtaccaattccgctttctcctgattatttcttacaacaatatacaggagcaggagcagcaccagaatacagaagcttcccataaataggatttcataaccagaaatgaattcataagcctgctgtgcactttttacaggaattgcataacagatcatccagtcattgtatccaagaggcatatatgccagataccggtcctcttcttttctctctttgaggctaagcttcaccagaccactttcgccaactttaaaatcttcctgaatatcctgaagagcatgctttcctttgagatttttttctccgtaatatttaaaaagattgattccatatgtgatctccgtaccagacgccgaaccactgtcaaaggcaatgatctctccatcacttgtggccagaagactgtttcccgctccatcaaaaagatcattaaaaagcatatggctcagcgctgtaacattacaggatccgcccaacacaccgatcactttatggtctttgtataccggcacacctaaaaccacccgcaccttatggtccacactgctttccaggggatcgctgatggtctgctctccactgatagcctcctgaaaatatctgcgatgagaaacattcttggttactccattgtcgtagtatgcatctccattcttatcaataagagcagccctctccaggtctgtcttttcataaatagatatcagttgttctttattttcttctgaaaaaagttcttctgattttcccattgcagaggcaatctcattcagatattgataattaatatccagtatcgtccgcaaatgttcactttgtctctgcacatttatcttcaatgtattctgagaattcacctgtacagccctctgcacacactcgaaaaaaataagaatccctgctataaccgccaagataaaaacgccggttgccataacataattttttaattcaaagtgattctttttcatacgttttctcctgatctaaccttttttgtcctgcatttttattttaccatgatttttgttttttctctataacaaaaaatctgcagattccaatcataagattgaaaaatgcagattttttacaacgatatctgattattatgccttattatgccgccttccgcgactcacgtccggcttatattgctgcaataagaacaacgttatttatttttctttgtgtttacgatcagcggaacaatttctcctttttttacatccaccagtcccttatcagtcagcttcagtgccgggcttaccggtaatccaagtgttgccactgacatgatcggattattatgcacatatcccagatctgtaaggctttttcttaccgccttcaatgcaaggccattctccctgattgatttttcggataaaagcccacataccggaagtgcaagttcagaaaggatccttccatcttttactgtcagaaatcccccctgcagttcccggatcctgtttacagcaaataacatatcatccggagagcttcctgccacaaagagattatgatgatcatgaaaatatgttgttgccacagttccctttttcaagcaggagcctgtaagaaatccatagccgatatttccgttcttcccatgacgttccaccaccatagccagaagacatccgctgttttcccagcagatctttccggctttcaccggcatttccaccagtttttcagtagtatgggtacgatccggattgatttctatcacacgaaccgttgcatatccttcctgaaaaggagcattcacctgaaaatccttcagaaaaatctccggaagctgtacactccggtaaaaatctgccggaaattcatatgtggaagcagacagcggcaactgcggttcatcctttgtataaatcggaacaccatttttgaatacagcttccggtttaagaacggacggatctttaagcagcataaagtccgcaagttttcccggtgcgatagctcctctgtcataaaaatgcatccgctgacatggtgtatatgtggcacagtagattgcctgttccatcggaaatcccatatcgatcgctttctgtaccactgcattcagcggtccctgctcatacaaaacatctgccatagtatcatctgttacaaaggagcaatactcgtagagctggttctggcagatatattccaggatttccggtttcagcattttatcctgaatctcaaaaaacattccgttttcgatccgctgctttacttcctcaagagtatgttctgtatgatcaccattaatacccagataaagaaactttgcaagatccagatccagtaatgacggacagtgtccctcgatcacatatcccggatggtcttttttcagatattccagaaaccggctgatctccagatcattttcccggatgatctgccggtaattcatgatttcgcctacacataccacatctttttcttccagcagatgcttcattgcactgcagtcaatgatcccgcctgtggtttccagcttttcactagttgacggaacgctgcttggaatcccgtaaaaaatatcgataggtgcattctttgccgcagagatcatttccagaatccctcggatccctttgacattggccatttcgtgaggctctgaaaccaccgtcgtcacaccattttctcctgcacattttccaaaaaaagccggtgtggccatagaactctcaatatgcatgtgaatatctgtcagtcctggaatcatgtatgatccctttgcatcgatcacattgtcagtctgaagatccgtatcctgttttctgtctatgtaataaaattttccatctttcaccgcaacattggcagatatgaatttcttaagataggaattaaatacctttgcgtttttgatcagcagatgaacctgctccataccatttcaccatccttagataattgaataaaaatacaacagacagactgctaccagtacatacatgaccggttcaacctttttgatctttcctgctgcgatcttcataacgagataagccggaagcgccacgcagataccatttgcgatattatttgcaaaaatcgtaaaggttacacataaaaatgccggaatatactctgtaatatccgaataatcaatatttctcatagcaccaagcatattgatgccgatatagatcagcaccggaccggttgccgcagatgggatcacaagagccagtggtgccagaaacagcgaaagtccgaagaaaatgcttgtaaaaataaccgtaagtcccgtttttcctcctgcttctacgcctgcagatgactccagataagtagtaagactcggcattccaaacaatgctccaaagcttgttgcaatcgcatctaccttaaagcatttatcaatacccggaagatttccatccttatccagatagcctgcctttgctcccactcccagaactgttccgaatgtagaaaagaaatccggtacaaacagagcgatcagaaatggaatataagcaaaattcagcgctcccataaaatcaactttcaggaactgatggccgatacctgccggaaatgcaaaaatggattccggagcatgtgtaacaccgaaaggaattcctgccagagtggtcagcaggatcgcaagaatcataccacccggtatatttcgtaccttgatcaccagaaggatcagaaatccgatcactgctacgatcacagatggagatgcaagatctccaaaggaaagacagttttttgcatcatttgccacgatcaatccacagttttttgcaccaagaagtgcgataaacagaccaataccggcactaaccgcttgtttcaggcttaccgggatcacacgtaccacggcttctctcagaccaaagaatgaaattatgataaaaagaacaccactccagaatatcacacctgctgcgatcggcatacttacgccttcattggtaatcatagacgcaataattccaacgcttccaagtcccggagccagagcaaacggtcgattggtaaccaatgccattgcacagctggtcacaatgatcagaatgatcatagctgtcagagtcgtgtgtttatcataaccggcgcctgccagaatatttgggatcgtggcaagcacatatgccatagttacaaaagttgtcagtcctgccagaagttctgtttttatatttgtattgaactcagacagtctgaactgtttttccagccagtttttcatttattttttcccccttgatatgatgataggatgtattgtaaaatatgcatatcaggaagtcaaattcatattatacataaaaattataccaaaatggaataattggaggaaaacatgaactatcatgaactgaagtacattctctgcattgccaaatatcagaatcttacaaaagccgcacaggagctttatatttcccagccaaccctgaccaagcatctccagaaactggaacgagaaatggggaccaagctgttcagccgcagcggaaacagctatacacctacctttgcgggccgcaaatatatggagtatgcccgaaagatcctgcagatacaacaggactgggaaaaagagctgaaagatcttacagaaaataatgaaggagaactgaacgttgctttcccactgatgaggagtacctgtatggttcctcagatcatgacctctttttttcaaaaatatcctaaagtaaaggtcaatatcctggaagaggcatattctatccaggaaaaacttctgctcaatgatcagcttgattttggcattttcaatgaagtacataaacaccccaagctggaatacgaactgctgaaaaaagaagaaatccttctgatcatgcctccggagcacccattggctgctgccggcagtgtatccactcacggcatatacccgaagcttaatctctcacttctggcagaagagccttttatcctgcattttccggaacagactaccggacagctttcgctggaagcattgaaagctgcccatatcaagccttatgtgccaatgcagagccgcaacacagaaacctgtgtcaaactctgcatgcaaggacttggtatgtgtttcaccccggaaacctatgtccaaaatatggacctccctgtaaaaccagcctgtttttccattggtgaagatggcgtcttcagcacactgacaattgcataccgaagaggtacctatctcccacagtacgcccgggattttatatgtactgcgaagaaggtcctgtagtgttttgatcaacatatattgaagcaaaaaatcttctgttcagagggaatatttttattgcattattctgaatattcctgtataattgacacaataatcaaaacttaagagcgtaacgtacaagggcgtacaacacatatttcctgtgtctgtacgcccttgtgctatttctgcagtcctgcgatatttcgctttgagaaagggaggagatttctatgatgaatgcaatcggaagtgtgataaaccagatcgacagtctgatgtggggctggtggatgatcattttacttctgggcacccatattttcatgaccatccgtaccggtgtgatccagcgtaagattggtaccgccattcgcctgtctgtcaccaaagataccaatgcggaaggtgaagtcagccagtttggcgccctgacaacagcccttgcttccactattggaaccggaaatatcatcggtgtcggtactgccattgctcttggcggtcccggtgcagtcctctggtgctggcttaccggtgtcttcggaatcgccaccaaatacagtgagtctctcatcgctgtaaaataccgcgtcaaaaccaaagacggccgtatgcagggtggtgctatgtatgccctggagcgcggattaaatatgcgctggcttggtctgatctttgcctttttcggtggctttgcttcctttggaatcggatgtgctacccaggtcaatgccattgcaacggtatgtaatgagaaccttcatattccgccggcagcgatcggcattgctgtggcagttcttactgcccttgttattttcggcgggatcaaatctatcgccaatgtatgtgaacgtcttgttccgtttatggcatttttctatgtgatcggatgtatcatcatcctggggatcaatttcgattttatcattcccgcagtaaaaaccatctgcaaatttgcttttacccctggtgctgctgcaggaggtcttgtaggacgtggtatcatgatggccatgcagtatggaatcgcaagaggacttttttccaatgaatccggtatgggttctgcccccatcgccgctgctgccgcacagacaagaaatccggttcgtcaggctctcgtttccagcaccggtacattctgggataccgttgtggtatgtctgatgaccggtcttgttctggtaaccagtattatgaaaaatccttcgatcgacatgggaaatatcactgatggcggtgttcttactacactggcttttcagcagatcccggttcttggtcctgtgatccttgtagtgggtatcatttccttcgcatattctacagtccttggatgggcatattatggagagcggtgcgtggagtatttctccggcaaaaagggactcatcccctatcgtgtgctgtacattgcggtagctgccatctcccctgttatttctctgaacctggtatggaccgtagcggatatcctgaatgcactgatggctattccaaacctgatcgcagtattactgctttccaatgtgatcgtaaaagagaccaaaaaatatatcaacgatctggatacacgggatgacacaccggtggaagtgatcgataaataaaaaaacgataaatataagcattttatataacaaagttacagctccgactgcttctcatattacaaagcagtcggagctgtccgtctacaaatgtcttcttcacttttttataatacatcctgcgctttcatctcttcggacacagcaagatattctttgctgttttccacgataccaagcttctcttcccaggtaaggtttcgtttgatcctggccggacttcccattaccagggagccatccgggatcaccgtatttttagtcacaaggcttccggctcctatgatacagtcatttccgatctttgcaccatccaggatcacggctcccattccgatcagtgtccggtctccgatggtacatccatggatcaccgcattatgtcccacagtaacgttgtttccgatatggaccggcatgttgtggctcacatgaatggtacagttttcctggatatttgtttcttctccgatcactaccggcgcatcatctccgcggatcaccgcataatataatacacagctgtcacggccgatcgttacatttccaaggatcacagactgctttgcgatcctggcaccttctgcgatctttacatttttataattcatttttcctcctgaatctgctttttttctgtacagaaccctggtatataatctgactatagactccgtgcacaacagcaattttaatgtttatactgactttttaacccatattatatttcgtccggatcacaatatctgtatactggtattccttttccggtgccttgctgtcaaagagaagctggaacaaaataatcaccggagaatgtccctgtacagccgcatcctgaccgataaggaaattgatcgtcccctctttcagccatttcagattttcttccaggaaatcattggcgatcacatgcatggttttatcctttccaagcttctgcaaggtctggcagacaccctttacaccatgacccgtaatatagatcccggtcagctccggataaagctccagaaattcttccacgatcttggatgccacccattcgtcatcataagaataccttatatccacgatctcgattcccggaaagctttctttaatctctgtcgtaaatcctttctgcctgctgatcagaccaggattggcaacctgtccggaaattatggcaacctgcccgtttccgcctgtcatctcccccatcaggcctgctgccgtacgaccggcctgaaaggtatcctgtcccacaaagcataacctttttgtatcttccagatccgcattaaaggtaactaccggaattccatactcttcctgatactgattgatcctcgctctcaaaagctgatcttctgatggagtcagcgcgattccattaaacccctcttcccggagttcttccattgcagccattactttttccggttccacgccctcgatctcatagatctttactgttccgccaaagctctccacttcttcttttgcttccaggactccctttaaaacctgctgcataaaaggagtctccatatactgaaggatcacaccgatacggattttcctctttgccatggcaagggcacgaccggcacggctgggctgatatcccatctcccgggcgatccttttgatcctttcctctacttccgggcggatacggcctctgttgttcagtgccctgtccacagtgcctcttgaaactcctgctgcttccgcaatctgttgtaatgttactgccatattttaccctccaaaacctctcctgtgtgctttgtgttcacgcgcacgctcttttatctcattatacacatttacactttctcaggcaatccctgatttcattattttataattttcctttacgatcagacaggcccggcataaacaggtgcattccctcagccaaaaatgcttccgaaaaaatctccggaagcatttttatcattgcaaaacagattcctttgtcaatccagaagctcctgtaccatctcgggggtaaaggttacagccttcacatgatccacctcaatctgatacagagcattggccgcaatatgctccgcagcctgctccagatcacggattcctgtggtatcttcaaatttcttaattactgcgtccagcgcctcatccgttacgatacattcttcctgtttcagactcatacgtttcagaaccttgggaagcgcaaatctggaaaagatgatcttcttttccttcggtgtgtaatcaggaatatcgatcactgcaaaacgtgacatcagaggtgcgctgatctttgccttatcattggctgtggcaataggatagacaccaactgtcggaaccatacattccatatagttatctgtaaaaccaaggttatccagcagtgtcagaagcacgtctgccggatttccgtttcctttacctgatgcagccttgtcaagctcattgatgataaataccagattggattctcctgccatggaaaaagcctccatgatgattccaggcttggcatttgcataaacacgagagcttcctgtaagctgttccggatcattgatcgaactcatatccaaggttgtccacggcattttcaggattcttgcaactgcataagcgatctgagatttaccggtacctgccggtcctacaagaagcagtccgtaagcaggaagtgtatgagtacggttgatctgaatgatcgtctcaatgatcctctgttttacacgctccattccataaagctcctcatccaggatacgacgtgcttccttcggatcaatagactcaaaataattatgcttccactgaatattcatcatgatggaaagtgctctctgggcatggcgtctttcctcctgagaaacctcatgagaacgggcaactgccagatttcttcttgcccagagacggatattatccggcatagtctttccggcacagttcataaagtcggtgatactctgaatactggtaagcttcatatcgtcaccgtcttcttcctcctcatcgttctcattttcttctgccggcgcactgcttgcaaacagacgctcgatcataaactgaagaaatccgtcctcagcagaaagcttggtgcctccgccaaaagcgatctcgcggattttgtaaacagcatatccttcttctgtattctgtcctgaaagacggatgttgatatgattttctccgagccatttgatcaggcttgtaaaacgggaatcaatcttcaggatgtctgccggaaaaactccgtcctcttccttaaactcaaatgcagtctgcttcgcaggattggaaaaatatccgcaggaatgatgtttccactctcttttgctgttatccaggatcagcatcggtttctccggtgtggcttttgtttcattagaacgaaatgttatatatgtgcactggctttttgtctcttttttatctgccggcgctgcgctgaaatcaaaaactggcatattttttactcctctttctctgaaaaatatcttcattcagtttatcatggattagaaatctcaacaactgctgatatggttttttatgcattttttattcattttttatattcgtcattttcccgtaagttgtttaaacagttccacagtttgctgattgacactgcctgtaaactatgttatcgtgcaatcatgtctgctttcattttttacaaaagctgacacagttaccatgtatgtgatttactgtttttcacgtcattgtaattgtatttttttggaggaggaaatgagaaatcaactttcacagcgggatgatttttatccacagatcgttaagcttgtcatccccatcatcattcagaatctgctaagtgcagcggtcaattccgccgatgttatcatgctgaattttgtaggtcagtcatccatctccgcagtatccctggcagcgaattattccaatgtcctgtttatggtatattacggtcttggtacgggagccaccctgctttgtgcccagtattatggaaagggagattacaaagccattcagatcatcgagggaatcgctcttcgtttttccatgatcatctctgttctcgtggcactcgttgcatttaccatgccacagatgatgatgaaactgttcaccaacgatccggagcttctgaccattggttcttcctatatccgcattatgggtatcacctatatctgctggggtatgacggaggtttatctggctgttcttcgaagcattggccgggtaactaccagcatggcgatgaatatgctggcatttggactgaatatccttttgaatgcgacttttatcttcggattgttcggagcacccaagcttggtgctaccggtgtggctattgctactgcactttccagaatgatcgagctgatcgcctgttttattgtttctgctttcagcaaaaatgtccgactggatctccgatgtatgttcacaaaaaacaaactgctgttcagtgatttcgtgcggctttccctgccggctcttggtaatgatatttcctggagtattggtttttccatgtactctgtgatcctggggcatcttggtacggatgcggttgctgccaattctctggttgtagtagtccgtaatatcggctctgttttctgtttcggtattgccagtgcaggaggtatccttctaggcaatgttatggggcagggcgatctggaacgttccaggcgttatgcttccaaaacactgaagcttactgttattgcaggtttttttggcggacttatcgttcttgccatcacaccgttcgtaatgagatttgcgtccctgacacccactgccatgcattatctgaaatatatgcttctgatcaacagctactatattatggggtctgcagtaaatacaaccctgatcgctggtgtgttccgggcaggtggtgatacaaagtttggtctgatttgtgataccattgatatgtgggtatatgcagtaccccttggatttttcgctgcttttgtactgaagctaccggttatgtgggtgtattttctgctctgtacggatgaatttgtgaagtggccatgggtgatcaaaaggtatcttagtggaaagtgggctaagaatattacccgcgagaatatatttgaaaataaatagaatacagaaatattttagacggctggaatctgcgttatttttcaaaaattcgctgtttgagcgaagcaagtctcggacttttagaaaataactttagcagattccagccgttcgttactcaactaccgctgcaatccttctatcaccttctctgtcagacgcacaacactttcctgtacctcccggatctccttctccgaaataccatccttatgaaatcccccggtgcaaaccactctctttcccagctttttcgaaacctgctccgccatccaccggcaaatcacctcgtccttatgtcccggaaaattcaaaactgaggaagtcgcactcacagaaccatcccctgtcagagacactctcggttccgtctgcaccacacatcccagatgaggtctctctccgcctttcagacagataagcacatcctctccgataaatgcagcactgacctccagctcacagcctgcagtctccacacactcttttataatccattccatctgcgatactcctttgcttcgatcccaaacggttccaaaagctttgccgcaatatgatacaccatatcatcaatgctttccggtttatgataaaacgtcagcatcggcggaatgatccgcactcccggaagcatggaaagctcataaagatttcggagatgaatcccgcttaacggtgtttctctggctgccagcaccagtattctctgttccttgaccgtcacatctgccgcacgcagaataagattatctgcatagccactgtggatccccgcgatcgtcttcatgctgcagggcacgatcagcatcccctctgttttgaaagaaccactggccggttttgccccaatttctcccggtgcacatacatgatctgccaatcgtttcacatcctccggttccagctccgtctcctggcgaagagtcagctctgcactggaactcatgatcagataagactcaaaatccggattctcccggatgatctccagacattttacaaggagcggcaggccgcttgcacctgtcgcaccaactataattctctttttcattttttcagccatttctccggatccagttccataaaacgggctctgtgaaaatcttccttcagatcataaggcaccgtacagtcaaaaatagtcttgcatgcaattccatgatcacggatacttggagaaaatgcaggatcattggacggatcaagaggatgacaacggacacccggaatggtgatcacatccacatccccctggaatctcgtattcatcgcccaaagtacatcattcatatcaaagcagtccacatcttcatctaccagaaatacatttttcagctcactgaaggcggaaaatgcaagaagtgcagcctgacgctgtcttccctcatcactttgagaaagctttttaaactgaaggacagccatatactttccacctccggcactgctgcagtatacgttctgaagtcttccaggcattgctttttccaccatgccatagatgctggcttctgtagggattcccgccatggatacgtgctcctcacttggcccgatacaggtctgcatgatcggattttcacgatgtgtcactgctgtaaccttgatcagccaacactgatcacttgcaggccctgtatatcccggaaactccggcatggcgtatccggtattgctgttctgatcttcctttacacgcacacccgggatcacttctccctcgatcacgtattccgcattagcgatggcacgctcgttaacggttaaacatttacagagttccaccggctctttgcgcagtgcaccggctacagacagctcatcataccccagtggtgttgtaggcggctcaaaacaggaaccgatctcaatagcaggatcaactccgatactgatagaaatcggcagcctttgtcccagctcctcagcacgctctgccattgctccgatatgtctggcaccaggtgtaaagaaaatggaaagctcatcttttccctgaatgcaaagacgatgaatggtcacatcgtgaactccagtatccgggtgtgtggcgtagcacatgccaagtgtgatatacgggcccgcatcatccggtgtgttcgctggcgcaggaatcagcttatagaggtcaaaatccggatctgctgccttatgcaccacctgctgacacggtgcatcactttcaagatcgaccggtggaattggattctccacgcttttgcagagcatctttccaagattttccggctgagtgtcaagtaaagcagcaactctttttctgcttgccagaagaccgatagctactcttgcatccgggtgtccttttatacgattaaagatcatggcaggtccttcctttgtgggacgcttcaccgttccaccggctcctacataacgatatacccctgcaagctctgccatcggatcaacttccacctctgtttcgatcagctgatctggcatctgctccagaagtgccagagcacttctcagatctcttactttttctgccataaaaaacctcctgcgttatctttatattactgttcactccgttctcagtaacatctttattttcttatgttattttatctcttttttacatggtgaatcaattctttctatgatataattgtttccaatatggaatgatttgtcactattttctaaaaggcaggtgttaccatgactcttgaacagatcgactattttatctgtgcagctcaatcccggactttttttgatgctgcagaagctatgcatatctcccagtcctccctttccaagcagatcatgaaactggaaaaagaactggagcttaccttatgggaccgcagcaagcgtactgctgtgcttactcctgaaggagagtttttttacaaagaagcacttaagatttccagacagtatcatcgttctctggaagcagtgtaccattttaaggacagtaagctccaggcacttcatattggaacacttccttttctttctcagtaccatcttacttctgtgatacacagtttttgtgatacacacccggagctttctttttctctgaaggaggtagaagacgaagaacttctttccggtcttgaaaaagacttttttaatctgatctttgtacgaaaacacatgatagacccggagctctatacttttcatgctctcacagcagaccgtctggttgctgtttttcctgaagctcatccctctgcgtccaaaaaatcggtctctctttccgaactgaaaaaagaatcttttatcctgatgcctccgcacacttccatttaccgtttctgtatgcaaagttttcataatgcagggatccaccctcagcttttgcgtactgcccgtgcagaatctattgtcagcgcagtggaaattggcgaagggatcagccttcttacagaaagcagctttcagttctttcgtcagccttcgcttgttgctgtcccggttaatggactggaaaagctatctgttggaattgcccataaaaaaaatatggctctcacaacctctgcagaatgttttctgcagtttgtgaaaagccatatgtaaggtattttttctataatccaagcatcattcccacaccatgtaccgcaaacgcaacgatccatgcagtggcacactgtactgctacaataccagcagcagctcttacagttcccatctcccgacgcacagttgcaatagctgcaacacagggtgtatagagcaaggtaaagatcaaaaatacgtaagcagtaaacggtgtaaataaagtctgaagcaatgccgtatttccgcccagaaggactgtcagcgtagacacaacgctctcttttgccataaagcccgtgatcaatgcggtggatactctccagtcaccaaagcccagcggagcaaaaagtggtgccacgatgcttccgatctttgccagaaggctctgatctgtgctggtaacaaggttaagacctgcatcaaagttctgcaggaaccacacgatcagcgttgccgcaaaaataattgtaaacgctttctggataaagtccttcgccttttcccagatcaactgtcctacactttttgcagaaggaagccggtaattgggaagctccatgacaaacggaaccggctctcccttatatttcgtctttttcaggatcagcgcatacaggatcccgcagagaattcctgcaaaataaaggctgatcatcacaactcctctccactgcttcgggaaaaatgcactggtgagaagtccgtagatcggaagcttggcactgcagctcataaacggagtaatcaggatcgtcattttccggtcacgttcactggataatgttctggttgccataatggccggcaccgaacagccgaatccgatcagcatcggcacaaagcttcttccggaaagtccgatctttcgaaggagcttgtccataacaaaggctacacgagccatatatccggtatcttccaggattgacaggaagaaaaacaaagtaacgatcgtaggaagaaatccgatcacgcttccgataccgcttaaaattccatccacaaccagtgactgcagtactgagctgacacctgccacctccagtcccctgccaataagtgcaattacccagttcacgaccatagtcattccgtctgaaagccaggctcccagataattaaacgtcatcacaaatacaattgccataattcccacaaaacagggaattgctgtatattttccggtaaggatacgatctatggcgacacttcgtttatgttcacggctttctgccggttttaccacagttttctcacaaagcttttcaataaaattgaagcgcatgttcgcaagagctgcctcacgatccagaccgccatccttctccataacatgtaccagcccatcaagaacctttttttcaccttcaggcaaagccagacgtttttcgatcagagaatctttctctacgatcttcgtagctgcaaaacgtacaggaagtcctgctttttttgcatagggttcgatcagatgaacggctgcatggatacatctgtgaagtgcgcctaccggatccttcggtgactgattgtcagtacagaaatcaattcttcctggtgcttctctgtatcttgcaacatggactgcatgatcgatcagctcatcaattccttcattcttcgctgctgaaataggtacaaccggaattcctaaaatctcctccagttcattgatccgaacagaacctccatttgcccttacctcatccatcatatttaaggccagcaccattgggattccaagctccatcagctgcatggtaagataaagatttctctcaatattggaagcatctacaatattaatgattcctgtcggcttctcattcagtagaaaatctcttgttacgatctcctcgctggaatacggggaaagtgaatagattccaggaagatccgttaccgttgcctccggatgcctccggatgcttccttctttcttgtcaacagttacacctggaaagttaccaacatgctgattggaacctgtcagctgattaaaaagagttgtctttccacagttctgattacctgccagtgcaaacgtgatcggttcccctttgggaatcgtatcaccgatccggttcttacgataatctcgagcctttccaagttctcccacaccaggatgagcaatcggctgatgccgttcattttctttcttcgtttccgtcatggattcgatcgatacgatctcaatctttgcagcttccgccagccgcaatgtcagctcatatccgcgcagcacaagctgtaccggatctcccataggagctgttttacgaagagacacttctgtccccggtgtaagccccatatccagaagatgatgtctcagctccccctcgccacgaacactgatgattctgccacattctccagtctttaatttgtccagtgtcatattgtcacctcatcataagtacaatttacatggtcaatacatatatctgtattatccactggtacatcgtttcgtaaataactatatcaatcggatttacagacaagtgaatggtatagttatttcaaaaacgatgcactaatataaatgtaacacaatttaagttatttgacaataactgattaatctgataagtttcgtgcaaataataccaattcaaaagttatttatcattaacatttatattttttctcactttagcacaattcctgtttgataaacaaacaccttcatattttttgcagacatacaataacatccatgtatattcccgcaataaaaaagcgcaaacgacatattatctgtcgtctgcgcctttttattgcaagaaccgcttcggtgaatccttactcaccaattaaccaattgtacatttcctcatactgacgtgcggaattgttccaggaaaaatctgcagccatcgcgcgatctaccattttattccattcacgtttcttgtcataatatacactctctgcataacggatcgtagcaagcatttcatgtgcattgtaatttacgaaggagaatcctgttccggttccctcgaattcattgtacgggacaactgtatccttcagaccaccggtctctctgacgatcggaagagttccataacgaaggctcatcagctggcttaagccacatggctcaaacagtgacggcatcagaaatgcgtcagatgctgcataaattctgtgagacattgcctcatcatagtagatctgtgcagataccttgccatgatacttccagtcaaaatgacggaacatattctcataacgttcctcaccggtaccaagagcaacgatctgaaccgcatcctgacacagttcgtccatgatataagcgatcagatcaaatcccttctgatctgtcaggcgggatacaataccgatcatcatagctttcggatcctgctcaagtccaagatctttctgaagctggatcttgttcttgatcttctccttgcggaagttctttgcattgtagttcttggtgatattcggatctgtctccggattgaattcattgtaatcaataccatttacaataccacgcaggctgttggctctcgcattgagaagtccgtccagcttctcaccataaaacggtgtcttgatctcttctgcataggtattacttactgtggtaatggcatctgcaaataccataccgcccttcaggaagtttgcgtccttgtatgcttccagtttatccggcgcaaagtagtaatcggaaaggcctgtgatatccttaacagtcttaacatcccatacaccctgaaatttcaggttatgtattgtcataacagtcttgattccacggaagaattcattctcctggaaagaatcgtgaaggtaaaccggaacaagtcctgtctgccagtcatgacagtggatgatatccggtctgaatccgatcaccggaagaaccgataacacagctttggaaaagaaagcaaatttctcaagatcccatggtgcactgtcatatggtttcggaccgctgaaataatattcattgtcaatgaagtaaaactggatcccgtcatactgcatctgcataatgcctacatagcagttcttaaatcccagatccatataaaaatgggtcacatactccattttgtctttccattcctgtttcatgcaggcatatttcggtaagatcacgcgtatatcaaaatattttttgtcaaagcacttaggcagtgagccggcaacatcagcgagtcctcctgttttgataaaaggtactgcttctgatgtagcaaacagaatttttttcatctgtattcccctccctgggtacacccgtttttatttatgattatactccaaaattcatctaatttaaagaccgatttttatattctagtctgattttatctgcgatcagtgctataaattcagaattcgtgggtttcccttttccggtgcttacagtatatccaaacaattcatcaatggtatccatctttccccggctccatgccacctcgatcgcatgtcggatcgcccgctccactctgctcggtgttgtctgatggcgtttcgcaatggttggatataataccttggtaatggaattgagcatttccatgtcattgacagacaaaatgatcgcatcccttaaatactgataccccttgatgtgtgccggaactccgatctcatgaatgatattcgtcacatcggtttccagattcctctccggctgaggctttttggtttctgtgatacctggccttgcaatctcccgcactcttctgtccccaatcttccgaatatgtttgatccggtttaaaagtgtggtgttgtcaaaaggcttcaaaacataatagtctgctccaagactgaatgcatcctctgtaatcctctcctgtccaattgcagataatacgataaacactggaacttttttgacatttgcgttatgggaaaatttctccataacggaaaggccgtccatcttcggcataatgatgtcgagaatcaccacatccggctccttatctttgattatgttacagatttcttctccgttgtgtgcttttccgaccagttcaaggtctttatcttcttcgatcatctgaccgagcatgtctgtcattttcgcgttatcatcagcaattgcaacatttaatttgtccatgaggaccctcctaacttctatctccttgggtttccagacataccccctgtcaccacggcagtaaccgacactgttagctgcctgcgctttccccttgctggcgacaaaattattatagtggaaatcctgtagtaaaatcaagataaaagtagttattttatcacactttcgtacgatatttttcgacattttttctcttatatatcacaaaattcactaaaatgcaggtatttccatctgtatccggcatttttccccatataaaaaagaggcacttttcccggactttttccatgtttttgtgcctctttcctcaactgcagattatgcattgcctgtcatattttcaataaaaatcccatatccgccggtagaatcctgcacaaatacatgagtcacggcaccaaagagttttccgttctgaagcacaggacttccagacattccctgaacgatcccacctgttttttccaggagttctttatctgtgatctggatcacgaagctcttattagaatcctcatggttcatatcgatcctggtgatctctgcggcatattcttttacttcgccgtctgtgcagcagagaacagatgcgggtccaattttcagatcctgtttgtaacctacaggaatcttcttcagatccagatttttcacctgatcagcatccacagttccaaaaatgccgtttttactgttttcggaaatctcacccaggatattgtcagcttcgtatcggatcaggccagatagttctccgggatttcctttttctcctttccggatccccaggatctgggcgttgtaaagatttccatctgcgatacttaaaagttcgccggtatccacatcgctgatcccgtggccaagagcaccgaaccctccattttcgtccacataagtcagggttccgattccctgtgtatcgtccctcacccagattccaagcttgtattttcctttttcatctttcacaggcgttagggacaggggaatcgtctcttttccccggcggaccttcagtgttacagattctccgcaaagatctgcaagatcctccagaagatcctgcttgcactggatccggttctgatcaaaagccacaatataatctcccggctttacaatgtcccgggccggttcttccatctccccactttccgaaaggatctcgcctgtatcaatgatcagaactcctttcgtctgcatataaatacctactgcatctccgcttgcatatacttcttttgcagttatattttttaccttcacatccttaaaagggatcactcccaagagtctgcagtgcaacttatagctgtcttttcctgaaacggtgatcgcatcatcaaagctgataaaagggcgtttaagaagattggctacttcccggctgtcctcatgatccaccaggatctgatccgggatctttctgtccagaagccggtagcccagccatcccatcagaatcagatccagcgcaagaaatacaaggagccaacatcgatattttctttttctgttcatcttacgtcacatcctttgtaattttctgatacaagcaaatccccacccactgcttattgcttttcgcaactgaagcaggggactgacttgattcggttaaaaaagaggaccgacctttcggccgtcctctcttagtatgtaacgtataaattatttcagtcttgtatttttttgttgctgtgccaattccttcatctctcttgcatttccaagaacagccggcgtgatctgggcaccgcccagaagtctggcaagctcacgaacagattcctctccttccagaggatggatctgggtgatggtttctgttccttctacatgtttctcaatctcaaaatgggtatctgccattgctgcaatctgtggaagatgtgtgatacaaagcacctgcctgtgctgtccgatcactgccattttttcagagaccttctgtgcagtacgcccactgatccctgtatcgatctcatcaaagatcagtgtatcgatctgatccttatctgcaaggatcgctttgatggcaagcatgatcctggaaagctcaccaccggatacaatctgtcccagcggttttctgctctcacctggatttgtggaaatctcatattccaccgcatcataaccattatctgtataatttttcctgcggtcaaaacggatagaaaaatccacatcctcaaaattcagttccttcaatccttcgataatcttttcatccagctgtttactgtattttttccggatctctgaaagttcatgcgaagcttcctcaagaatcttttctgcctgcataagtttttctttcagtaaccggaaattttcttcgaatctttgaagtttttctaatttttcctgctgttccttctgataagacaaaatttcatggatcgtctgtccatactttgccttcagactattgatcagatccagtcttttttctgtttcaaaaaaagtttcttcgtcaaaagtcaaactatccatataagaggacagatcacggcagaagtcactgagaagtgaatcgatttccacaagagcttcctgtaaaggtgcaagatccttatcgtaatctgcgattcttgaaaactctttcagggcatttccggtcatatctgcggcgccctgttcatatccggtcatcccacggaccatttgtgctgtttccatgattcttctggcattgctcagcttccggtagcggtcctccagtgtttcgtcctctcctggaataagagctgcctcctcgatctcattgatctcaaattccagaaaggctttttcgcggttgcgctgttcctcatccatatccagtgctttcagctgatccgcacagtcccgatactcctgataagctttccggaccttctccctggcaggaaggatctgttcctttccatatacatccaaaatagccagctggcggtctccataaagaagtgactgatgctcatgctgtccgtgaatgtccagaagacaggctgctgctgctttcatctggctgacagtacttgtctctccgttgatcttgttgatacttctgccgtccatgatcttgcgggacatcagcacctgtccgtcttccggatagatgtcaagcgccgcaagggactctctggctttcgtgttttcaacctgaaacagcaactctaccagggcataggaagcattttcacgaatcatgcttctggaagtttttccacccaggatgagctgtatggatcctaacagaatggattttccggctccggtctcaccagttaagatatttaagcctggtccgaattccacctctgattcctctatcagtgcaagattttttacatgcagatgtactaacattgatttcctttctggtataaagcatttacgtattctgtcattttattttcctctggataagatcccgccaagcttctgaactacacccggtgcctgttcagaggttttcaccacacacataatggtatcatctccggcaatacatcccaggatttctggccatttcatggcatcaagagctgctgctgccgccatggccattcccggaattgtttttaccactacgatattctgtccgatgttcatagcgatcactgcatctttcagaactctggaatatttatcacttaacacatccggtgtatgttcttccaggatcgcatatctggactttccgttgctgcctgcaacctttgtcattttcagagcacggatatctctggatacggtagcctgcgtaaccttaaaaccggcctcattcagtcttgctgcaagttcttcctgtgtatcgatctcgtactgacggatcagttcgataattttttcatgtcttgctactttcaaaattgaacctcctgcatcagctgttactcattttctgtctcagaacctccacaaagctcagatggttcagcttgaggatttttgtcctgactgtggctttccggatcacgatccggtcaccggtgaccatggatatctgggtatccccgtcgaaagaggccaccgctttctcaatggtattatgtcttccctcaccgatctctactgtaactgcctcttccccggaaagaatgatacttcgggtgttcatggtatggggagcgatgggggtcatgatcatcatactggcactgggagaaaccacgggacctcccgctgacagactatatccggtagaaccggtcggagtggaaatgatgataccatctgcattgtatgaattcatatatgcatcattaacataattcttgaaacggatcacacggagatgtccttctcttccgatcacaatatcatttaatgcgatatcttttccaataagttcctctccacgatagatctttccttccagcatcatacgatcttccagctcatagtcatctgacagaagccgatccagagccggatacacggaatttttatccacctcggcaagaaatcccagagttcccagattgattccaagaagagggatatccagatgcaccacatcccttgcagcctgcagaagtgttccatctccccccagtacaataatgcactgtgtatcctgcggaatcccatccgggtccgtataatgatacggtccttccattttttcggtgatcttctgcacatgacacctggcaccatgcttctccagataggcaatgatcctattagaaaatgtcagttccggatccttggcactgtttggaattatataaaatctgtccatattgcttcagtcctttccaaacatcagtccagctgtccgtgggcttcctttaccacatcctctacggatacgtcaagactcacaggtacttctgttccttccggatgttttttcagatgaaggagatattcaatatttccctcaggtcccttgatgggagaaaaggaaagatgacagggctccatagaaatactcatggcataatctctgactttctcaatgacttcttcatggaccttcggatcacggacaacacctttttttccgactttttctctgccggcctcaaactgaggtttgatgagacatacgatctctccgtcctctgtgagaaggtttcttacaggaagaagcacttttgtaagggagataaaagaaacatcgatcgaagaaaatgctgccggaccttccagatcttccggtaccacatagcggatatttgtcttttccatacacacaactctcggatcatttctgagtttccagtccagctgtccatatcccacatcaatggaatagactttgaccgctccgttctgaagcatacagtctgtaaagccgccggtggatgcgcctacatccatgcacaccttatccttcagcgtcacgccaaaatttttcatggctttttccagcttcagtccgcctctgctgacataaggaagagtctttcctcttacctccagcttgacagtctcagcaaacatggagccagccttgtcttccttctgaccgttgacatatacttccccggccatgatatacgcttttgctttttcgcgtgacggtgcaagtccctgttccaccatcatgatatccagtctttttttcatattatcctccaacagcccggctctttatgtgccgggctgtaaaatgcctcacagctttgtattcttctgcaaaggctatgtcctttattttctgttattcacaagattttcccagctctgttctaccgcatccaggattccctgtacatttaaacctattttcattcgctgacgatccaccgttccatgctcaataaaatgatccggtattgccagtggaagaactcttacttccggatgacaggcttccatataagcagatacatgttctccgaacccaccgctttttacattctcctccacagtgaccaaaagactgtggttctgcgaaagccgatcaagaagctctgtatccagaggctttacaaaacggacattgacaaacgtagctcctgctattttgtgatttcttatctcttcacagaccttctgacagacagaaaccatgctgccaaccccgagaactgcaatctcactgcctggagtgatcacttcacttctgcccttcttaagtggctcatgacattcttccatatcggtacatgccgatcctttcggatatcggatcgcacagggaccatccagctcttctactgcaaatttcaacatctcctcaagctcttttccattcttgggagccataactgtcatattgggaatcatggacagataggataaatcaaagcatccatgatgtgtttcaccatctgctccgacaaatcctgccctgtcaatggcaaagatcacatgaagatcctgcatacatacatcgtgaaggatctgatcgatccctctctgcaggaacgaagaatataccgcaaaaaccgggatcattcccccaagtgccatgcctgccgcaaaggttactgcatgttcttccgcaatacccacatcaaaaaaacgctccgggaatttcttccggaatcggttcagtccggttccatctggcatagcagctgtaatagcaactacttttttgttcttctctgccaaagaacatattgcaccggaaaaatgatccgtatatgtcggcgctgtttttgctgcaagaggtctgccactctggatgtcaaaaggacctgttccgtgaaaacgctccggatgggaagatgccggtccatagcctctgcctttttctgtaaggacatggacaacaaccggtccctccactctctttgcctcattaaaaagcttcatcatctgacgcatattatggccatctaccggtcccagataagtcagccccatattttcaaaaagcattccgggaatgatcagctgcttgatgctgctcttggtctttcggaccgtatctaccacggcggttccaacatagggaatctttttgagtgtttttgtcacgccgatcttcattcctgtataagtctcagctgtacgcagagcgcttaaataggtggacattcctcctacgttcttggaaatagacatgttattatcattgatgataataataaaattagtcttcagttcagccgcattgttcaatgcttcataagccatcccaccggtaagcgcaccatctccgatcacggaaaccacatggtatttctctcccatcaggtctctggcacggacatagccaagtcctgcggaaatggaattggaactgtgtccggtatcaaacgaatcacagtcactttcattcctttttggaaaaccgcttaaacctccttctttacgaagatccttaaagccgtcttttcttcctgtaaggattttatgtgtataagcctgatgtcccacatcccagatcagcttatcctgtggaagatcaagcacattatgcagagcaagagtcagctccaccacacccagattggatgccagatggccacctgtctcacttacactctggatcaaaaagctcctgatttcctcggcaaggcgcggaaaatcctccaatgaaactttatgaatatcatttggctttttaattttttccagaatcatttgtacccttcctttgttctttctatttcctgcggctgacaagactttccacaagaagatccagaaagccgttcttcctgtcaaggtcgtctaaaagttctaccgcatggtcagaaagttctttaaccctgctggctgctgccggggctccaacaaggcttacataggtaaccttattgtttttttcatcactgtggatcggttttcccagttcctcctgggtactggtcacatcaaggatatcatcctggatctgaaaagccagcccgatgttttctgcagcctgctccacaatctcaagttctttctcagatgcccctgccagcacagcaccggtcatcatggaagcctcgatcaatgcggaggtcttgtttttgtaaatataatccagcatcttgtgttccagaggtttcccatcattctccacatcaacactctgtccaccaagcataccgttgatgccggtcttatctgcaatgatccgcatagcggctatcacacggtctttatcctcggtcagatcaaaggcggaaagcatcacttcataagctctgttaaggagtgccacaccgcttaaaacacccatggcctctccgtatactttatgtgtggtcagccttccccttcggtaatcatcgttatccagtgcagggagatcatcatggatcaacgaatgtgtatggatcatctccatagccgccataaaaggctcacaaagcttatcctttcctccaaacagctcgtaggtttccctgatcaggatcgggcggagtctctttccacctgccgtcatactgtaattcatggcctctgccatggtttttgcaaaaccggattcttccggaagatattcccggatcacatgttctgcttcttctgttcttcttttcagttcttctttaaaattcacgaaatgtcccatcctcattcatctgaagcatctttttttctacagtatccagtcttccgttcagatcctttaggagctccattccctgtctgtagaggcggaaagactcctcaagaggtgtttctttatcctccagcttccgggcaagcagatcaagctccccaaaagtatcttctatggatttctcttctttctttgcttctgccattatcgctcttccttcctgatgcgatccgcaactgcttctatgactccatcggttactgcaatggagatcctgtcacctttttttatctgactgatctctgtcaccgcatgtccgcctaagtcggacacaaatgcatatcctccatttagctttcttaatggagaaagtccctcaaaccgctggatccatattgccagttcatgtcttttctctgtaagcttttgttccatggaagaacgcaggcattcctccagctccgatgcatactgacgtttttcacgtaacatggactccgggctcagatactggaatctgttctcataggccttaagttttgcggcaaaaagttctgtcttactgttcatggcacgctgcagacggtctccgtacatatgaaagctctccagaacactgcgaaaatcatccactgccagctctgctgcagcagatggtgtaggtgcccgcaggtctgctacaaaatccgcaatggtaaaatccgtctcatgtcccactgccgagatcaccggtgtcctgcactcaaaaatagcacgggcaacgctctcctcgttaaaggcccagagatcttcaatagagccacctccacggccgacgatgatcacgtccacccctgctttatccagcatccggattccctttacgatactctgcgccgctccctctccctgcacaagtgccggataaaggatcacctgcagatatggattccttctgcctgcaatattgcggatatcctgtactgctgcaccagtaggtgctgtcaccacgccaagggtatgaataaaatgaggaatgggctgcttatattcctgggcaaacatccccatatcctcaagttcctgtttcagtaccagataccgttcatagagggcaccagcaccttccagtgtgatctcttttgcataaagctgataacgcccgtctctctcatatacgtctacaattccgcctgcaactaccttatccccgtccttcatgcgaaaagcaagacccctacggtgtcccgcaaacatcacacagcttaatatgcctgtttcatccttcagggaaaaataaatatgtccgctggtatggtatttacagttggatacctctccctttacatagactttccggagaaagtaatcctgggtaaacatatttttgacataatggtttacctgaccgacagaatagacatttctcatgcgttctcttccggggcttctgctgccttctcttctgtgtcagcagtctcctcctcgtttttcttttcatccttctcagatgcgatcttacccagtactccatttacaaaggatccggaagcatctccgccaaatcttttggcaagttctaccgcttcgttgatagctactcctgtcggtacgtctgcatcatattccatctcatatactgccagacgaagtgccgcaagatccacacggctcatacgctttgtcttccatccacggcttgcactgttcagctgtgcatcgatctcttccagatgttctttcacatgtgcgtacttcttcttcatatattcctggtcctgttctgaaagttctccaagaccttcaaaataaagagagagctgttctgtcatctcttcttctgaattaaactctgtcataaacataagtttaaatacatgttctctctgttctcttcttctcataatttcctcctaagacggaaaaaaggaaaggtttactttcctttttcgttctccatatccacgctggcaatatgaatatttacatctgcaacctcaagtcctgtcatattctcaatagcggatttaaccttctcctgaaccttcttgcttgtctcaagaatgtttctgccatactcgatattcagtgacagatccacggtaacgactccttccagaatggttactctcacgcccttggacagattcttctttccaagtttacttaccagctcattggtgatatttcctgccatggaagcaactccatccacatctgttgctgcaagtcctgcaacgatcgcaacaacttcatctgcaatgtgaacttcaccgattccgcccaaatcctgtatcttatatgttgttcttttttctgccatgggaaaccctcctacggatataatatttttgttcgtaattttatactattatatcaaaaaaagttatgaaataaaagggcttatttactgaattctgtcagtaccagatcagggtttctgtcctcaaccatgccaacactccatgcattgacaaagagcagcaacggatttcccttaaggtctgtgactttcttcatatcagaagttcccacgatcttatctacttttacagtctccttgttggcaatccagcggatatgctcatatggaagtgtttccaggcggatatctacattgtactcattctccagacggtatttcaggacatcaaactgcaggataccgacaacacccacaataatctcctccataccggtgttaaactcctggaatatctggatcgcaccttcctgagcgatctggttgataccttttacaaactgttttctcttcatggtatcgatctgacgcacacgtgcgaaatgctccggcgcgaaggtcgggatcccctcaaaggcaaatttctttccaggtgcgcagatggtatctccaatagaaaaaatacccgggtcaaagacaccgatgatatcacctgcataagcctcctccacaacatgacgggattctgccatcatctgctgcggctgaagaagtcgcatcttcttgtctccctgcacatgataaacctctttggtcgcatcaaacttgcctgaacagatcctcataaatgcgatacggtctctgtgagccttgttcatattcgcctgaatcttaaatacaaaggctgaaaaatcatcactcataggatctaccggtccgcagtctgcagttctcggaagcggagaagtggtcatcttcaggaaatgctccagaaatgtttccacaccaaagttggtaagagcagaaccgaaaaataccggtgtcagctgtcctttgctgacctcttcctgagaaaactccgcgcttgcgccatccagaagctcgatttcttccatcagctgctctttctgctcaggatccatgacctcatctgcacggggatcattaatatcaatctcttctatcacaccttccttggtgcccttctgtgtatcggaaaaggtaaggatcttctttgtattacgatcaaacacaccccggaatttcttaccggagccgattggccagttgatcggacaggttgcaataccaagctctttttcgatctcatccagaagatcaaaagtatcgttggcatctctgtccatcttattgataaaagtaaagatcggaatgtgtctcataacacagaccttgaaaagcttacgggtctgtgcctcaacacccttggatccatcgatgaccataactgctgaatccgcagccatcaatgtacggtaggtatcctcggagaaatcctgatgtccaggtgtatccagaatgtttatacaatatccgtcataatggaactgaagaacggatgaagtaacggaaatacctctttccttctcgatctccatccagtctgatactgcatggcgggccgtagccttaccctttacacttccggccagattgatggcccctccatacagcagaaatttttctgttaatgttgttttaccagcatccggatgagagatgatggcaaatgttcttcttttttctatttctttcgtatacttcgacacgtgagcctcctgtatattctctgatatctctattttactataacctttcctattctagtatagacaaggctttgctgtcaaggcaattcagtcgtaaattccctctgtatcaatagtctgatcgttctggatatctgcagccgtctctgcgtcctcagatgtttgatccgccggatcgctttccacagatgcagcggtatcctgcacctcatcacctgtactttccgcattatcctctgcacctcccgtatttttttcagcttcatctgcagtatttatgacatccgatgcatttttactttgactcagaggcgtgatcacaatgctctctgctgccacaccggttttcctctttacaatatcctcgatctgtgcacgttttgcatcctccagatctgcatccggcaccacaacatccgcagtttcacccgtcagatttacgatcacattttcaaagcccttcgcctccagaagaagctctgcagccgcctctttttctgtaagatctgtcatggaaaccattgtgttaatggcattctgtttttcctcatcactgatgtctttattactgatgattgcctgcaggtccgctttgttctgggaacgcacctgctccctgctgacttttgcctgtgctgcaaaatccgaagcaccggtaagtacggcctcgcccggggatgcggtatccatcacctccgactgggttgtgccatctgccccgttctcatccagaagggctgtttcatcggtcagatcataatccatgtcatccaggatactgctgctgtctgtactcgtctccttatccttaaatcccagatccacatctgcgaaattcagatatccggccacagcaatgagaatggccagcgaggtgatgattacctgatttttcttcatgatctttttcacttctactctcctcatttcattttcattattctaattttattagcgtcgatctgaaataatgccataattgcctgctgaatattctggactgtcactgcgctgcctgctccctgggccgccaccagtacaccggtaacttcatttttgctgcttatggaaaagttttccgtatttccctcatccccggtcataatgatcacttccacttctccgactccttccacattggaaagcagttcctcaaggcggctctccaggcgggttttctccgcattctgatcctctgctgttttactgttctttcgggttaccggaagtcctgccaccagaagaaggattcccagaagaaggaaaactccccactccttccatcccatcctcagaagccaggatctgatactgtcctttcctgagtccgcagattctttcgagctcatttttcaccgcctccctctgtttttctgtgactgttccataaagtgttatggtcagctgaagctctttctccagatctacttctgtttttgccgaaaaaaccccttctttcctgaggataccctgaacctgatccttcaactcctgttcatatgctcctttaagaaatgtttcccttattccttctgcttctgtctccatacgtacctgttcttctctcccataattattgctgaatccggacagaagttcttcactttttcccactacggcaaatataggtgtacagatcaaaagcaccaacagaagccccataaacagccgtatatactgctcataacgcttatcaggcagaatatgcagaagtgctgtagtaagtacatgaaaaaaagccaggcttttcatccactgataaagttctgttctcatcccaagcctcctcctgccatcaggatcagaaatgtaagcatacataaaatttccgcagtaaacaggattctcatcagaagtgcacatccctctgccatggtaccaaaggcttctaccagccgtttgtctgatacaggctgcgccgcagccgccagaaagcgataggtcagtgacaaaagtccatatcggaccaatggccccgcccccaccgccaggatcaccagtaaaagcgcaatgcccagactgtttcttacaagaacagctgtggtaaggaccagttccgtaactgcatttaccgcgctcccgatcccaggaagagcaccggcagtttttcccacagcactccgcttcagagaatccattaccggagctacaagcccacgcaccacctgcagtcctgctgccactccaagtaatgtccgaagcccccaggagatcaccgtctcgatcagctcagccatttttcccagcatttcttccctggaaagatgatttacaaatctcagaagaatatataaactcactccgggaagcagtactcgttccaggatccattgaaaaagccacaccagaagcagtactccctgataaaaagcagctgcactggatgcacctgacgctgctgccactgccataaaatacaccggtgagagttccttcataaactccgtgatccacgcaagtattgaaagcagtgatgcactcaaaccggaaaaactgttcatcagaagagtaaaaacaagaagatacaccacataaaaactgatctctcccacctgcccgttatcaaaggcaccggcaaacccggaaaaaacggcagcgaacaacagcagaagcagtaacttcacgatcagctctttttctctttcaatgccataaaaaaggagactgtgcaaaaattcccgcacactctcctccgaaagcacctcttcccctgacaacagtctgtgaaacgcttctgtaacagaaaatgttttttctccaagcatctcatctaccatggactgcaggttggtaagctccatctgatctgtgatctgttgttccgccgaagaagcataaacgatcacaccgccaaaacagtttataactacagccagaaacagggctgcacaaatctctgaccaatatcttttcatgcaagaaatccctgtatagtatccagcagtgccagaagaaccggcatacttaaaaccattacagataaccggcagaacagttcgatctgtgcaccagtggaggaatatcctgcatctctgcatataccggatgaaaattgtccgatataggtgatcccgatcatcttcagcaaagtagtgatatagcttccatcaatcgggagactctgtttcagtctctccagggactggaacagatagctgatcttccctaccgctaatcccagtatcacaagacctattcccatcgtaacaaggcttacatactccggtgcgcggtctttcagaagaatccccagaagaacccctgccgctcccagaacagaaatcttcagaatatccacggttctttccctcccctacagtacaaaaagctgctggatatttttaaaaagttcataaatatacggcacgatccagaacagtactaaaagaagtcctgaaaaactcaccagaaaagcctgttcctcccttccgctatgtttcaggatctgagaaagaacagagaccaggatccctactgcaccgatcttaaatatgatactgacctccaaatgatccctccttttcttctgaaagcctgtccttcttactactgtctgataaacaatactataccaggagaaccgcaagcagcaggcctccaagaatcccaattccctggtacagttttttctttccggaaacctccgctttccgcttcaatatctctgcttccagattattttcatacagggaaagctgtcgcatctgcatttccagatccatatagcccagatattctccgaaagaaaaaaaagcgtccttttccccatgggtaaggcagctttttttcagggcgctttccgcacattccctgcatatctgtgaaagtttttctcctgttcccgctttcatcctgtccgcggcactgatgagaaactctctgtattttccattcattcttcctgctgctccataaaaagcatccggcagtgatgcattcccgcagcggatctcgcctttcaggcagatcaccatctgaagcagtttttccagtatacgaatctgctccgaaagtctcatacttccggaaaatcccattccggctcctgccaccactaccagaatacatcctacaatccggtacataggcatttcccattttcatcatagattccttccacgattcctgcacgttcatgctttcccagaaaaatatatctctggaaaacccgcgcttcccacaatttccggaaaaaaggctgggataatgtttcttccatggaagctccatgtgcagttgcgatcagacgacatccacagtggataactgattccacagccttgaaatcttcttcttttccaagttcatccacagcaaccacaaccggcgacattgaccggatcagcatctgcatcccttctgctttcggacagccgtccaggatatccgtacgcattccaaggtcattctgagggatcccctgatagcatccggccagctcactgcgctcatcgactactcctaccgtaacaccggaaatatttccccatccattactcatctgccggatgatatcccgaagaagcgtggtcttcccacatctgggcggagaaacgatcaaggtatgcatgatctgctctcttgtctggatatatggcagcacttcttctgcacatccctggatctcatgtgccagacggacattgatgcaggaaatatatttcatcccacggatacggtttccgtccaggatcacctttccggtaactcctacacggtgcccaccctgtacactcaaaaacccctggcggatctcatcttcataagcatacagggaatagccgctgacatactccagtgtttccttaagatcttcccgcgtaaccagataaggttctgtatctttttgccggaggaaacattctcccccatcataagtgaggaacagaggtcttcccacgcggagacgtatctcatataatttatcataatcaaggtctgcatccaccagaagctggcggacattactggcaaacaggttctggatctggtttgcgtccatgttttcacctcttacacttaaatatattgcggacatgccggatttagtacctgttgtcttttttgatgctctctcgttttttctttattccgacagaaaaaaaagactctcttcttcgtcataggtctccatcttcgaaagattcagcttcaggacccgatccacaatatttacggaggacgcacggtatgcataggcacaggattcaaacatcacataaagactgtcaccctccaccacgatctgttccagtcgttccggaaaacgataagttctggcagaattctcgtttacatacaaacgcttatcggattgttcataaaacaccagcctggatggcaggattccaaaagaatgagagatcaaaagcttatcattataaaaagcaattccctgaacctgctccgatatggtggaataatccaacggaactgccatttcaaaatccatgcccagtttctcgtccatggtattgatcagttttccctcttcgtcaactccgtatcgtgcaattacactttcgttatatttttcaaagcagcctacatacagacacccctcataaaaggtcataaaagaatctctcacgatcccataaagactgactatctggaaagtatccaccggcagatggctgtcatcataatcgtaggcttctattgtatccatctttatactcactgcctgtgcgatcccgttgatattggaggaataccataataacttatgctccgggtcataggtaagtcctcccacatgaggctgtccaggcagtatcacttctttaataaaattatgattttccttatcgatcacataaatgaccgaattatgtttctgtgtgctgcagtaagcgctgaccagcacataatcctctgtaaccgccagtccctgaggcgtcatggatgtacacatggcaggagtggcacccttttttgtgagcagcgtcctagtattcttcagcccgggaatgacatatgttccatattccttctctttttctctcccatcaaaggcaaaataagaaaaatcctctttctgggaaagcatctgtttctgtccccgcagtgtatacactgcagcacctcggtttgtcaccacagcttttgtgggcagctccgtttttgcacggtaaacaaatgcatataaaaaataacatatgcacagcacaaaaacaactgccaggatcttcagaataaaaatcctgaagctgtgtttcatctctttgttcatttcatcgtctctatttgctatctcaaaatgatgtcttcgtattcaaatcgtaattccaggctgtctctggaccaaatcgcaccactgtatcccggttccagatccagcattatgtaatttcccttatccatggaaatcgtacgcagatccctggacagtccctctccggtccatttgatatatgcttctctcaagacccactgggcaaaaaaggctttctccatatcatctgcatccaggatttcccgtatcatatctgccggcaccattctttcaaggagccgttcgtaatttaccttcttgtggatctgcacatcaatgcccacctcttctccggcaaacagacacatcacatattttccggaatgtgtgatattataatgaattcttggaagcagggtaaaaaaaggtttcccatgttccccctttgaccgaggctcaaaagcaagctttcgtccaaattcccgctcaagtccgatttccagaagtttttccccgatcatatgctccatattcttgctgttatattcatctctgatcttcgtataataaataatcccattcataatccggcctcctcaagaaaacgggacggttcccgttccttctcatactgctgtcttacataatacaggcagagtttcttctttgcccgtgtcataccaacgtagaaaagcctccgttcttcctccagatgtgcctccaggactgccttccgataaggcatgctgccttcatttacattcatgatatatacattgtcatattccagacctttgaccgcatgaagagtggatatcaccactccttcccgtttcacatcctgtttcttcgcctgttcttcaagctttctggtatactcgtccatataggccatccattcttccaatgttttcattcctctggcactttcatggatccggttcagggtttccataagctcttccggttttattttacgataccttgcatattcctgcaagtattcttcgtatcccatgccattccggataaaattaatggctgcataaggggccatagtctttaagatccgaagatgtgtctccatcgttgtgatcctgtcacacatccagtctttgtctttgtaaaactctcccaatgctttaaaatcaacgtttttttctgtcagagcatctctggctatgtatcggtttggccggttcatgatctccagaaatgtactgcggctccggtctccttctgccattttcaaataagcgatcatattccggcagatccagtgtcggaacaggttgggcagtttttccttcatagtgaaaggaaccccatactccatcaacgcagcgaccagtccttcggtttcctgattagtcctgaaaagcagcgctgtatcttcaatattatccccttcttccatccggttccgcaacaggcttgcaactgccatatattcgtctctgggatttcgaaattcttttatctgcaccggctctcccggttcatttggtgtggaaagtttttttgcataacggttttcattgtaattgatcaccttcatagctgtatccaggatatttccactgcaccggtaattgatattcaggatcactgtctccgcatttttaaaatcttccgggaaattcagcatgatctccgggcgagcgccacggaaatgatagatagactgatcatcatctcccaccacaaacagattgttctccggtgctgccagcatcttcacgatatcatactgaagatgattgatatcctgaaactcatccaccagaatatagtgaaactttttctgccatgcagacagaatatcttttcgttttttcagaagttcataacagctcaacagcatatcatcaaagtcaagttttcttctttcattcaggacttttcgatatccctgaaagatctgtcggaacacttcatccgggcagcaggaagaataataatgctccagagcgattcttccaccctttacaacactgatctccttggcaatatcttccacaaaatccccttcctgggactgttctgcagcacagtttaccaccagttctcttaagatcgcatatttttcttcttcggacaggatatttcctccattcagaccataagcctgtttgagtatcccgtaaaacactccgtgaaaagtcccgaaagtaacgccggttcgctgaacaccggtaaatttcagaaaccgttctttcatttccactgctgctgccctggaaaaagtcacaacaagaacagaggaagccggtatcttcccttcctggatcatatgtgctgttctttctactatgacggaagttttccccgaaccggggcctgccagaaccatcataggtcctgacaggtgggcgatcgcccttttctgagatggatttcgtttcataactggattatcgatcacactcttatttattttcaagcttttcgattgctgcatgtacacgtttcagtgtctcttccttgccaatgatctccatgatctctgttgcaccggccggtgtcatctgcttgccggatactgctgtacgaagcggccacataacataaccattcttatatccgtgctcctttacaaaagcgcttaaagatgcatacagcggatcattggtataatcctcctgtgcttccagtaccggaagcacttccttgagaactgcaagagaagtctcctctgttgttttcatctttttgtggcggtacatcgcactgtcatactccggaactgcctcaaagaaatctacaagctccggaatatccgggaatacttcaattctggtctgaaccattcctgcgatcttcttaagatcaaaatcttttttcagaacttctttcagatacggaagtgctctctcatagaatgcctccggatccatcttcttgatatactcaccattcatccatttcagcttggcaatgtcaaaaactgccggtgatttgttgatatgatgataatcaaatgcctccacaagctccggaagagaaaagatctcacggttgtctgccgggctccatccaaggagtgcaacatagttgatcactgcctctgtcacaaatccctgatcgatcagatcttcataggaagaatgtccacatctcttggaaagcttctgatgtgtctcgtctgtgatcagcggacagtgaacataggtcgggatttcccatccgaatgcctcataaatacgattatacttcggtgaagaggaaaggtattcgttacctcttacaacatgtgtgattcccataaggtgatcatcaattacatttgcgaagttgtaggtcggataaccgtcagatttgatcaggatcaaatcctccatctcctcattgttaacggtgatatctccgtaaataacatcatggaatgtagtggttccctctattggcatattaaagcggataacatgcggctcacctgcatccagacggcgctgaacctcttccttggaaagatggagacatctcttgtcataaatagagatctccttacctgcaacagtacgtttcatgctttccagttcttccttgccgcagaagcagtaatatgcatctccctgctcaataagctgtttggcatatttcagatacatgcctgttgcctgacgctcgctctgtacatacgggccaaatccgccatccttgtccggtccctcatcatggagaagtcctgttttctcaagagtacggtagatgatatctacagctccctccacataacgttcctggtctgtatcttcaatacggaggataaaatctccgccttcatgttttgtgatcaaataagcataaagagctgttcttaaattacccacatgcattcttcctgtagggctcggtgcaaatcttgttctgatctttgtcatttcttttctcctcgtttttgttgtttctctttataggtgctattatatacccaaatccttcaaaatgtccataggttttccggcggaataccctgctatccctctcacgtatcttcgcatatacagtcaagaccacccgcttagcgggtggcttgctctgtccctataagggactattccctgcttgcgcccggaaggcgcactgacagtctgccaactgcaccacatttacagcagccccttccaggggctattccagtgcttccttattccggcgctgccccaaaaggggcttgctggtttgctttgatttcctactactgctccaagcagtttatttcttgtttttcttcaccggctcacccgtaaacgggtcgatatactctactaatgacatctggtcatattctaaatcttcttttaattgattctgaatatactcttttattgcagctgtattttttcctactgtatctacataatatcctctacaccagaaatgtctatttccatatttgtatttcaaatttgcatgtttttcaaatatcattagtgagctttttccttttaaatatcctactatttctgataccgaatatttaggtggtattcttactagcatatgtatatgatccggacaacactctgcttctattatttctattccttttcttctgcataatgatcctaatatttgtcctacatctacttttatacctttatagattacctgtcttctatattttggtgcaaaaacaatatgatacttgcattcccatttagtatgagctaaactatttacgttcattttatgaacctcctgtgatttaatatttgtggtttgcagacctacatttattttaacacaggagattacttatatctaaagatcttccctccccctgcatagcagggggtttatttttactgtcacacaaaaaaatcctctgagacactgtcgtctcagaggatccttgatttctgcttatgcttctacgcctttgttcttaagataatcgatcacatctccaactgtgttcagatctgtaagctcctctgccgggatctcaacattgtactcatcctcaagagccatgaccagttcaaacagatcaagagaatctgcaccaagatcatccttgaaagatgtctccggtgtgattgtagatgcctcacaatttaactgctctgcaagcatttctttcattttttctaacatgtcttattctctcctttaatcgttacagatcgaatctgtttcctctttttgagcaaagtatatagtctgcaaaaacagttgtcaagaggattttcccaaaaaatggctccagagcaaaaatattttgattttaaaactattttactcttgaaattttatctgacgggccacgctgagagctattgccatctccagcatcaggaacacaatggacgttcctccgtaactgataaagggcaaggtgacacctgtattgggcatcagattcagtacaacggcaatgttcaggatcacctgcagcgcaatatgtataaaaatcccggtaacgatcagtgagccaaacagatccggtgcattctgcgcaataaaaaacaacctgtacaaaagatatccgaacaggatcagtacaaaaatccctccgaaaattccaagctcctcacagataatggaaaagatcatatcattttgtgcttccggaacacttccaagcttctggatactatttccaagcccgcggccaaaaagccctccggagccaatggcatacaatgcctgcaacgtctgataaccgccttcatcggaatatttctcaggctgaagccatacaagtactcgcataacacggaagctgtcactattcttggtcgtcgcaaccagaaaaagtactccgatcacaataaggatcactcctgccgctgccacagcaataaacggacgcatatccggatgtgccacaaacaccattccaactgttattcccaaaatgatcatggctgtactcaggttatctgtaagtatataagccgcaagcgcaagtcctgcccccggaagtcccaggatcatacagctctttaaagttttcacctttcgtcccatttttccgatcatgtaagccatcatgataataaccgcgatctttgccagctcggcaggctgaaagttgatcggtccgatatacagccatctggtagcaccatgagaggaatgtcccagcggagtccgcacaagtcccataaggatcagcgaagccacatacaacgcagttgtaaaaggaagaaggatatgataatccagtatttttgaaataaataacgctccgatcagacatgctgtactgatcagtgcctgtttcttaaaataaaacatatcgttgccataattcacttctgccatatatgaactggtgctgtaaagcatgaccagtccaaagcacaccagcagtacaataacagctaccagattataatcataataatcagatttcttattctgcttttttctgttaagcagagtttttttcattctatcaccatcgctttctgtaactgcgaagaatttcctgatatccacgagtattgacactccccccagctaaagcagggggattcttgcttctcccactactgcattggcaaacaccttacggtactgcaatgtcttacacagtgtccacaagctatatttatactgttcccgtatgccctacggtacagtttttatctttatgcagactgcatctgcagtccttttttcagaatattgatacttgcattcgtatcccggtcatgaaccccatggcatttgggacactcccagatacgaatgcccagattctttatccgtggatttctgtagccacaacggctgcaggtctgactgctcggatacatcgttggtactctgtgaatttcatttccataccagccagctttatattccagcatttcaaaaaatcttgcccaggaaacactcgctatcgattttgacagtttatgattccggatcatccccttgacattcagatcttcaatacagatggtttggttttcacgcaccagcatcgttgactgtttctgcaggaaatcattccgctgattggttgctttctcatacactcctgccaccctgatccgctgcttctcgcggttatgggaatctttttgttttcgggaaagcctgcgctgttctcttatgagttttcgcattgagcgttccagatatctgggatttgataccgtatttccattactgtcggagtagaacgctttgattccgacatcgatccctatcgttccgccagcatttgagcgtggttccggttcaaaatcaacatttaaaaccgcaaaatattttccagccggtgtgtgctcaatgatcacgtgattaatcttttccacttccatcgactgccgtattttaacaaatccaagtttcggaagtttgatatatcttcccacaatacgaatattatctttttgatttaccgttctgtatgactggaaccggttatgtttacttttgaaggttggataggaagcccgtttctcaaagaaattcacaaatccccggtcgagatcccgcaaagactgctgtaatgcaatggaatctgctgctttcagaaaggcaaactcctcttgctttttcagttcagtcagcatggcggaagtctgggaatagccgatcttttccccattttcatagccttccttacgcatggcaagtccccgattgtagatgaaccggcagcatcccagggtctgatggatgaagtttttctgttctctgttcgggtagatcctgaatttaattcctttttgcattatcccatcttatccttttgtctctgcgatgttttctggttttcaatatactgttttactgtttccagcggagcaccgcccaccgtcgatacaaaatagctgtttgtccagagagtcggcattttcgttttaagatagggaaattcctgtcttaaaattctggacgtatagcctttaaatgactttacagctttgtggatgccaaactgaggatctacttccaaaagcatatgaacatgatctggcatgatctccatttccagaatgtctacagaaagatttgcagcatactctgtgagcagttccttcagccggacgtccacaccgttaattaatacttttcgtctatactttggacaccatactacatggtatttacaggaatagacgacattgttgtttgatttatatgttgtgttcatatttgtattatactataatttattagttaatacaattactattttgtccatcttcaattacttgcataaattcgatggacgcgtcttatatccccatagctgaagcaaggagatttacgacgcattggataaagaaagtaaaaaaattcccggaaagccgcataaatgctgtctttccgggacgttccataaatggacctgaggggaatcgaacccctgtccgaaagcctatcccttaaggcatctcccatcacagtcgctgatttaacattccctcggcagtacgcccaccgacaggcttactgcttcagtagcttcatgatacatctaccggggcaaagcttacccggcaaggtttctcacatggtcgacgccagattcccgatgtgtgagtgcaacggggctgacgagcagcttaggctgctaacgctaacttttcgtctgcgtttatatttagttcccggttggtacgcagtccaggagtctgcggatggcttccctaacttcaaagcccccgtcgaaaccagtacaagcccttaaaagacttctgtgaccggatcatttccggtcatctctggtggacagacgaatttcttagtctgttttttgactggatttaattataccagaatgatttttcgtgtcaaggatatttcaaaaaaagtccagactgtacagttttttcttacctgtacagtctggaatatgcattcaaacttttcaaacccggaacttatggcaggtactgtaaataccgtctctgtttgtcttgcttcatctgtttcccctaatcccgttacaagatcagagacagaatgaatacctcaatgtgatcaaccctttactgcaccggctgtcatacctgcaatcacccacttctgcgcaaaaatgtatactaggatcaccggcagggaaaccagtacaacatcggcacatacaagattccagcttctgctgaactgtccgtaaaaattgtatacagaaagaggcaatgtccatttggatgaagaattcaaaaggtacatcggaatctgaagttcattccatacccacataaaattcaaaacacctgttgttgcaaggaccggcttcaaaagtggcaggatcactgtgcagaaaagtcttccacccactgcgccatccataaccgccgcctcgtccaactctttcgggattcctttgataaatccgctgaacatcatcgttgtaaatggcatatacagagaagaatacacaaaacagagaccaattcttgatccgtaaattcccattttctgcatcagctgaatcgtaggaagtgctgcaaagggtgcaataattccaagcgtaatgatcttatatccgatcctgcatccttttgtatctcttctaacaataataaagcttaaaaatgcagaaagagaaacgatcagcgccacagatataaatgtaatgaacacactgttcccgagtgagcgcataaaatctttttccagaactgctatatagttttccggatgccactcactaggcagactgatattcatataagcagcttctcctttattcttaaaggaagtgagaagcaccatcagcatcggataaatcgttacgatactcacaagccagagtatgatctccagcagcagattgattctagtttttttcttattcatactataacaccgtctcccatcttgatgaaaacttctgataaacaactgaaacgatcaccaaaagtactgtaaatacaaggttgacagctacagactgcgcataacgtcccgctgacatttcattcatcatcaaagtaccaaagctctccgttgcatttccggggccgccgcctgtcataacatagatcaggtcgaacattttgaggccatagatcaggctgaacaggatgtttacatttacggtaggcatgatcagcggcagtgtgatatggcggaaaagctgccactcagatgccccgtcaagcttacctgcttccaggtaatccgaagatactgactggaggcctgccaatgtgatgatgatcgcataacctacatttctccatacctcagctacacaaatagcaaaaacagcagttcctctctgtcctaaccactgtatatttgcaattcccataagattcaggatattgttgatggtaccatgacgagtctggaatacagcgctgaagataagtcctacaacaaggcaggaaaaaatggacggaataaaataaaccgttctcagagcagtacgggttttgatctcgcggttgaggatataagcaaagacaaagcccagaagtgttacggtaacagtttttacccctgcatagatcagcgtatttacaaaagccaccggaacttttgtactgctgagaatagacatgatattgtcaaatcctacaaatttcagattcgttgttctggccgcactccagtttgtaaatgcataataatatccaactgtggatggtacaataaaaaagataaaaaataccacagccgggatcagtgccaggtacagtggatatattttttttcgattcataatttcctccttaaacagcttcaggtttgaagttttacccccaaacctgaaaccatctttaaaacggatgtttatttactgggcaaaagattcaagtgttgctactctgtcgtcatcgatcagcttcacacattcttctacactgatgtctccattcataagctgaagcagtgctttaccaccttcctgctggttgaagcctacgatcttaggctgggcggaagatgcacgaatcagcttatctacgctgtctttatttccgtcatactgagaagaattcacattggttgtctcctgtttgaaaactgctgctgtagaaacaccatcaaatgcctgattataattctcaggatctgccataaagtttacgaaatcactggcagcctctacattatcaccatttttatttacaagcatcaggtttacgttaccaccctcataagttccttcatcacaggttcccataaataccggcatgattccaaaatcatcgcctacataatcgtaggattcactgtcataatctgtatcaaaccaggtatcccagcaaaagagcattgctgcttcaccggttccgagaacctcacttgtataatcccatgtatcagatgcaaagttctttccaaagtatcctttatctgccgcttctttaaaccaggtacacatatctgtgaattccgggatatctgcataggacatttctcctgcattcagcttctcgatatattccggatgctcctcaagtaccggatccagtgcgaactggtagaggatcggccatgcatctgctgccgcaagatagatcggctgcacaccattctccagaagagtatcacaagctgcattgaattcttcctgtgtcgttggctgcttgattcccagctcctcaaagatctttgtgttatagaaacagcctgaattagatgcttcccagaacggaagtccgatcactttatcattgtaagttgcctgaggaagaacagagtcctgaatatcggacacccagtcagcatctgaccagtctacaaaattctcttccggattgaagtttttcagattgctgtttccgaaatgaatataaagatccgggatatcacctgttgtaaattttgtcagcgcgatagtctctgcattgtctgtatcaagaccctgctgatcgatcttgtttccggatgactcttcccacagagaaatgatcttctgcatatacggttttgcaaggtcatctgcatttccgtaaagtgtcagtgtcactccatctgctgcgctgactgttgccacgcttccgaatacagatactgtcatgcacgctgccataagtgctgcaaacatttttttcttcattgtacaaatcctccctttgtataactttttctttcgttcttaatatgttcacattatacaaaaatacttccagaaattccatggatattcgtttaattcaacatgtacttttttccatttttatactaattcatctatttgcacaatttcacttgtttctttcacgcacttcatataaaatagatacaacactttcctggaggtccgactatgaaatttcatgaatttccttttcagaaaaagctctttatatcctgtatcatactgaactctctgctgcttgccggattttcattgtttttctattattattcagcaaactctctgcgcgaaaatatgcgcagtaccttaagtggcagcgcagccatgatacagactaatctggacacattcctgaacgatgctgataacactctgaaagaattacagttaaataccacgcttcttgataccgccagaaatattccagagggagaaaacaattacctgcctacccatattacagcaagattcgcttttcaggaccggtttcgtactgctttgatatcttcagatctggatatctctcttaactacgtaagcaaatattacgatcacctggggattttttccccaaacggtacccgctacacagaaaaatccgttctggaaaataacgccaatcttaccagtgttatggataacattaactattttttctatatcccgccccataaggattactggggatacaatcgtaccgtaatttcggttgtacgttccatgcgtgatatttatcatcaatatggacttctcgttgccgattttgatatggataccctgaccagtcagctcctttctgactttgacactccggaagattatgatatcaccattctggacggcaatcataaccttgtctatacaagcggaacttcaatggatcgcaggacttttctggacagctggcacactgctgctcaggcttctcctgacaacgggagcttttccaatggaaatctatctgtttccagctatcatctttctccgcagaccggatggactgtgatcctcagcgaaaactcatccatatttgccgcgtccataaaacggcttcttatgatcagcaccttgctttttgtaattatgtttgcagttatgtccgccttccttatgggtctgacacaaaatcttacacagccgctccgtcagctaacggataagctgatcaggctcgaaccaggtgaaaatattcctgctctccccggaagcgtcgacaatgaaatcatctttctcaccaatgcgatccagggatatctttctgaaatttatgaccagaaccagcgtcttacagaagaacggcaccgaacattgattgcccattatgatgctatggaagcgcagctgaacccgcattttctttataataccctttctgttataggaatgaccgggttagcctccggaaatacggatgtctccgatatgtgcacagaactgtctcagcttctccgctactccctttcctatacagggcagtctgttcttctgtcccaggagatcgacaatgcgagacattatctctatattatgaagatccgctacgaagatgatctgaagtatgaatggcagctggatgattccctaaacgatatcactgtcccgaagctgattctccagcctctgattgagaattgctttcagcatggttttcatcaggccggcacggaaatccttcccccatggaaaatacagatccgttctcaccacgacaaaaacagatggtatctttccattgccaataacggagcgcctttccagaaagaaaagctttccaatttacgccgcaagattgccggctttacttttaccggaaatcaggatatggatcacgagtccattttccgacatcaaggatatggtctggaaaataccattctccgccttcatatctactatcacggtgaagaatatttccatgtttccggaaatgaaaatgaacagaccaccgtaactattggcggcccgttaaaaccagaaaaatccttcagccggaattccctctgatacaaaccgaataactgctccgcagcttcggtcaaaacatatgtaaaattttgctgatctgcaaaggaggatttatgatacgcgtacttattgttgaagatgaaccagcacttgccagaggactttctcttctcatcacaaaaaattatactgactttgaggttcttggcatctgcaaaaatggcagagatggacttcataatatcctgaagctggagcctgaactggtatttacggatattaccatgcctgtaatgaatggtcttgatatgatcgaggaagtacagaaagctcattttcacacccgttttgtgattcttaccggatatgctgatttcgaatatgccagaaaagcaatacatctcggtgtttctgattatcttctcaagcctattgtgcctaaaacattggaggatatcctgcattcctgcctggaacagcaaaatgcaaagatacatctgcttcagaaagaatatctgcaatgtgccctgcgcagcaataatcctgtggaacctgcccctgattttatggacagtacatcctgttcttttatttttgtttttcaggggccactgcgtcccagtatatacagcgagaccatttctgattcggattttgcaccgatttctcctgaatatatgaccatgctggaaaatgaatttcaggtttccctcattcttcttcatggaagacattttaatgaacaggtatatgccgtcacttacccatcttccaggcatccggatatagaaggacttgctggcaagatccatagcagccttgatctgtcagcccagcatccggaatcatggatcaacacggtactgtcaccgcgatcaccagattccggatctgtttctgacattattaaagacacttatctttttgcattgttcaaaaacggattcggatccagctctttacagacatgtagtattttatctaaccaaaagatgatcgtttctccggatgtccagcagctttgtgcagggatcaccgctctttctgaccaggaaagcctgtaccatatgatccattctctgatcatcatgcaggatcagaaagaactttcccagttccagctaactgccaacctgagatatttcttctccgccgtgatccagaacagtcacaaagatatcatttatccggatgtatctgagattgtttctaccagccattcctatgatgaactggaacgggaacttcaatacgaagcttccaaaatctgcggtttccaaaatcctgctttcggagaagaacttccttctctggcccgtcaggtgcgcaattatctggacagaaattttacccaacagatcaccacgaaatcttttcaggatatttttggctataatgagaaatatatttccacacttttcaaatcagaattcggtatctctcccagtaaatatatcagtgaacttcgcctgaaaatggctaagacattattacaaaacaaccctgatattcttaccaaggatgtcgcagaaatggtaggcttttctgatgccttttacttcagccgggtgtttaaagctcatgaggggatgtctcccagccaatatctgaagcagttaaaaaaatgagctttctattttatgacacaaaaaaacccgcttacgcgggttttttgctgcattatacacgtgagagatactcacctgttcttgtatcgatcttcagtttgtcgccctggtttacgaacagaggaacctgaacctgtgcacctgtctcaacagttgccggtttggtagcaccctgtgctgtatttcctgcgaatcctggctctgtctcaataacctcaagctctacaaaaagaggtggctcgattgcgaatacctctccgttatgagagcaaaccttaaccatctcattatccttaacaaatttcagagaatcgccaacctgctcctctgtaagaccaacctgatcatatgtctctgtattcatgaagtagtataaaccaccatcctgatacagatactgcatatctacacgctcaatacgtgctgccgggaatttctctgtaggacggaaggatttctctactacagagcctgtgataatgttcttgtattttgttcttacaaaggctgcgccttttcctggttttacatgctggaattcaacgatctgacatacgtttccatcaatttcaagtgtgataccatttttgaaatcacctgctgaaatcataaatatttcctccttaatatatgcggttctttttcgctatggattattctataataccttttgccatttttcaactgtttttttgtttaagccttcaatttttcttcaatttctgcgatcagctcatcaaaaggcttcactcctgtgacaactttaatgtccgcaaacttctcataaaccggatctctctgtttcagaagtttcttgatcttctcttctttattctcagttccttccaatgtgggattgttacttccttccagacgtttgatcaacgttgcagcagatcccttcagatagatgatcgttcccatactctggagatatttctggttctgctcctgaagaggcaatcccgcacttacagagattaccttccgttcgctgtctgtggacagttccttgactgccatagtctccagcgcacggtaaaatgcttctccaaagcgttcaaatacctcctttactgacatgttcatttttttcacgatcagtctgtccacgtcaataaacggaagccccaggtccttcgccagtctctttccaactcgtgtctttcctgaacccataaagccgatgattacaatatggttcatgaattctttccctcctctttttggtaaaaatgtaatactattttttccagatatcgcttcagtacgatctggatctcctcttttggatgaatcggtttcacaaggatcgtccggatccctgctctctttgctccataaatatccgtaaacaactgatctcctataaagatcgtcctgtcaagatcgattccgatcacctggcaggcttttttataatttttcacagccggtttatgggcattttctataaaatccccctctactgctttggcaaagggctccacacgaggtttctggttattggatacaaaacagtatcgaaacccgagagtcctcagcttttcaaacagtttctttgcccggtcatctgccggtgccccgtggggaacaatggtattatcgatatcaaagagcagccctctgtatccttctctgtaaagcttctcataatcgatcccatacgcagaatccagatattcatccggaaaaaagcatctgaacatctattccacctcagtcctttcctatcgctcgcaaagaggaatatactctgcttccggaaggacattcttatatgcgggacggatgatcttatccacattgataagctcttccatacgatgtgcgctccagcctacgatacgtgcaatagcaaacatcggtgtgtaaagctccagcggcagatccagcatgctgtaaacaaatccgctgtaaaaatccacattggcactgacacccttatagatcttacgctcctctgcgataacctttggtgcaagacgctctactgcagcatacagctgataatccttcattctgcccttttctcttgcaagctgttccacatagcctttaaagacttctgcacgtggatctgaaacagaatagatcgcatgtcccataccatagatcagtccacgtttatcaaaggcctctttatgaagaagcttcttaaggtatgcactgatctcctcttcatcactgtagtcatgtacgtgtttacgcatatcgttaaacatttttacgactttgatgttggcaccgccgtgtttcgggcctttcagagaacctagtgctgccgcgatcgcagaatacgtatctgtcccggaagaggaaaccacatgtgtagtaaaagtagagttattaccaccgccatgctccatatgaaggatcagagcaatatcaaggatctctgcctccagtgccgtatacttcttatccggtcttaacagacgcaggatattctcagctgtggaaagctcctttttaggctgatggatataaagactctcgcctctctcatagtggttataggcctgatatgcataaacagataacagcgggaaaacactgatcaggttgatacactgacggagcacattctccagttcaatattatccgggtctttgtcgtaggaataaagtgtcagcacgcttcttgacagagcgttcataatatctctggatggtgccttcataatgacatcccttacaaaattccgcggaagcatacgctggttcgcaagaatcccggaaaatccattcagttcttcctgatccggaagctttccgaaaagaagcagataggttacttcctcaaagccgaagcgccggtcattgataaaaccatttgtcagatccttaatgtcatacccgcgataagaaagcttacctgcgcagggaacctcttttccgtccacgatcttcgttgcctggacattggagatctgggtcagtcctgcaaggacaccctttccattcaggtcacgcaagcctcgcttgacatcgtatttaccatataaagacagatccagtttgtcattctcacgacagatctgggtaagtttctcaatctcaggtgtcactttcatgttgaatttgctcatcagttatttcccctttcgatttctgttttattgctgttcgataacggtccctcctcattcccctctcaagcaattctggtcttatttgtatatcccggcgtagctggccgggatatttcagatatattataacatttttttcggttccggtctatgccgaaaatataaccgaatacctgctttacagtttatcggttatgagcaggcagcgaatgcggatcgcaaatctcttcttgtctatctgcgatcagccctgcttatatgtagcaaagaactctttcatcttcttcattgccttgtcaagctggcggatatccggcagataaacaatacggaagtgatccggctggttccagttgaatcccttgcccggaacaacaagcacctgtttctcatgaagaaaatccaaagcaaactgttcatcattgaaaatattgaatttctcagtatcgatcttcgggaatatataaaatgccgcatgtggttttacaacggaaattcccggaatatcattcagtgccttgtaaataaagtctctctgctcataaacacgtccgcccggctgcgtatattcattgacactctgatatccgccaagtgcagtctgtacaatggactgtgccggaacatttgaacagagacgcatggaagagagcatattgattccctctatataacccttcgccttactttttgcaccacttaaaatcatccatccgatgcggaaacctgcgatcatatgagacttggacaatcctgaaaatgttacacagaacacatcgggtgcaagggatgcaatcgatgtatgtttatatccatccataacaagacggtcatagatctcatcagaaaagatgatcagctcattttctcttgcaatgtctgcaatctgttccaggatctccttcggatatactgcacctgtagggttattgggattgatgataacgatcgccttggtccttggtgtgatcttgctcttgatatcctcaatatccggataccagtcagactgttcgtcacagatataatgaactacatttccgcctgccagtgttgcagtagctgtccacagcggataatccggagccgggatcaggatctcatccccgttatcaagcagcgcctgcatacagaggttgatcagttcactgacaccatttcccgtataaatatcattaatggtaactcccgggatcccgcgaagctgtgcatactgcatgatcgcttttcttgcagaaaaaatgcccttggaatcggaatatccctgggaagtacgaacattactcagcatatccaggatcacttcctgaggtgctgaaaacccaaatggatacggattaccaatattcagcttcagaatctccattccatcttcttccattctggcagcctcatccacaaccggtccgcgcacatcgtacagcacgttgtcaagctttgatgatttcccgaatgttctcataaaaaccactcctcttctaattttcactattatttaaccattttaatttcatagtcaaaaaatatttattctatatcatctcacatttaggctttcaacgcaagaaataaaaatttaaaaaaatcaaatttagcacttcccttttttagcatgttaatgtataatagcactcgaatttagttttcaacgcaatttaatatgtgatgaggaggaaacaacaatgtcttacacagaagaagtttatgaaagagttgtagcacagaatcctggcgagccagaattccatcaggcagttaaggaagttctcgattcccttaaagtcgtaattgacaaaaatgaggaagagtatcgtaaactttccatccttgagcgtcttgtagagccagagaggatcatctccttcaaagtaccgtggatcgatgataacggaactgtacaggttaacaagggatatcgtgttcagttcaacagcgccatcggaccatacaaaggcggcttaagattccatccttctgtaaatcagggtatcctgaaattccttggttttgagcagacctttaaaaactctcttacaggccttccgatcggcggtggaaaaggtggctccaacttcgatcctaagggtaaatctgacagagaggttatggcattctgccagagctttatgacagagctttgcaaatatatcggcgcagatacagatgttccggctggtgacatcggtgtcggcggacgtgagatcggttatctcttcggacagtataagagaatccgtggcctttatgagggtgtccttacaggaaagggtctttccttcggaggttccctgatccgtacagaggctaccggttacggtgttgtatacatgctcaacgagattgccaaagctcacaatgattctgtagaaggaaaaacaatcgttgtaacaggttccggtaatgtagctatttacgctgttgagaaagctactcagcttggtgccaaggttgttgcaatgaacgactccaacggatatgtctacgatccgaacggaatcaaccttgacgtcgtaaaggatatcaaagaagtaaaacgtggacgtatcaaagaatatgcagaccgtgttgagggtgctacctacactgagggacttggcatctggaatatcaaatgtgatatctaccttccatgcgctactcagaacgagcttggtcttgacggagctaaaacactggttgcaaatggctgcaaatacgtcgttgaaggtgcaaacatgcctactactcttgatgcaacaacataccttcaggagaacggtgttctcttcatgcctggtaaagccgcaaacgctggcggtgttgccacatctgcacttgagatgagccagaactccatgagactttcctggacaagagaagaggttgatgagaaactccacaacatcatgatcgatatcttccacaaagctgatgacgctgctaaacgttacggtatggaagacaactatgttgtaggtgcaaacatcgccggcttcgaaaaagttgttgacgctatgaaagctcagggtattgtttaattaagtttcctgaatcattaatgtatatttatagcagggaccgcagaggatttttcccaggcggttcctgtttttttgtatccacttttacgatctctgaaaaatcgaacattcatgtttcaaaaaaggccggttgtcttttgacaatcggcctgaaatctcctgcatttgcggtctattcatttaatctcttaattgatcagcttcttcagctcatccataaaggtactgacatctttaaactctctgtatacagacgcaaagcgtacatacgccaccgcatccagatccttcagatgctccataacgatctctccgatcttggtactgctgatctcacggtcttctgaccggaaaatatctccttctatggaatcgatcatctcttccactctctcaatgggaatggggcgcttatagcaggcacgaagaacaccatcctggatcttggaacgtttatagctttcccggttctgatccttcttgatcacagtcagcggaatcgtttccaccttctcataagttgtaaaacgctttccgcaggcatcacagagacggcggcggcggatggaattggtatcctctacaggtctggaatctacaactcttgtattatcctggttacagaacggacatctcacggaactctccccctttccggatcagtaaatcattactaaattcgtttttattataaaataaatgcacataatgtgtcaataatcggacttgcataaattttacagattttccataaaatcataccaggtgatgaatttatgcgcatctgtgagctgaaacaaaaagaagtgatcaatatccatacctgccgcagtcttggctgccctcttgatgtggaattctgctgtgaaaccgcacgtctgaaagccctgatcatgccggaaccgggaaaattttgctggtgtttttccaaagaaaatgaatattccattccatgggactgcatccgccagatcggcgaagatatcatccttgttgatttccgtaatgaaaaactgctgtccggagaataaatacctccttattgtcaaggccctttattttttatattttccctgaaaaagtatatttcaaccgccctctgagaatcatcttaatgtactgacaagacaaggaggattctaagatggcactgaataaagttgaaatctgcggagtaaatacctcaacccttcccgttctcgatcaggaagaaaaggcggagctctttaaaagaatcaaagctggcgatgaagaagccagggaattgtacatcaaaggcaatctgcggcttgttttaagcgtgatccggcgttttcagaacagcagtgaaaatccggatgacctttttcagatcggctgcatcggcctgatcaaagcgatcgataatttcgacaccactcttcaggtaaaattttccacctatgcagttcccatgatcatcggagagatccgaagatatctccgtgataacaacagcatacgggtcagccgttctctgcgggatatcgcttacaaaaccatctatacccgggaaaactatatgcggcagcatctcaaagagcctaccattgcagaaatcgctgatgagatcggtatcgacaaggaaatgatcgtctatgccatggatgcgatccagagcccggtaagcctttttgagcccgtgtattccgaaggcggagataccctatatgttatggatcagatcagtgataaaaagaacctggaagaaaactgggtggaggatatttctcttcgagatgccatgaaccggcttggagagcgtgaacgtcacattatcgatctccgcttctacgagggaaaaacccaaatggaggtagctgatgagattggtatctcccaggctcaggtcagccgactggaaaaacatgctcttcgcagtatgcgaaactatctccggaattgatccatctctcttcagacaaaaagctgcagcagaatatctgttatcctgccgcagcttttatctcttatttcagcgctttctcaatttcttcgatcacgatccgaagcgccttcagccttgcatatttcttatctacggattccagaatgtgccatggtgcataagcagtgctggttttctgaagcatctcatctactgctgtttcatactgatcccatttttcacggtttctccagtcctcatccgtgatcttccactgtttttccggattgctctggcggtcgttgaacctggcaagctgggtgtccttatcaatgtggacccagaatttcacgatcacagcgccccagtcagaaagctccttctcaaattcattgatctcattgtaggcacgtctccagtcattctcgctgcagaagccctccagacgttctaccatcactcttccgtaccacgtccggtcaaagatggcaatgtgaccatccttgggaagccttgtccagaaacgccacagataatgacgggctttttcatgaggctccggacttgcgataggatgtacctcaaatccacggggatcaagagcctccgtgatcctcttgatatttcctccctttccggcagcatcccagccttcataggtgatgatcacaggcactctttttcggtaaagacggttatgcagacttccaagctttgcctgcagttccttaagctctgccttgtactcttcatcccccacttcttttccatccagaggaatctcgcttaatctgggcatctccaccagaggaaaaacattctgcaggatcggcactgcatgtttgctgttttccatggcaacctctatattgctaatcatggtttccagtacctgcagttctgcccacttccggtcaccggcatcgacaatataccatggagccgcagatgtattggtatcctgcatatactggtcgaaaatctttctgcacttcttataatgatcattctgccagagatcatattcattgactctccatctggtatccttgctttccagaaggatgcccatacgtttttcctgttctttccggtcgatctgcataaaaaatttcaggagtacatatccattatccgtcagctgacgttcaaatctccggatactgtcaatccgttttgaataattgtcacccttcagctttttatccatacgttcacgacaggtctgatccatccatcctgaatccaggaatgtaaacttgcccgcttccgggatttccctgaaatatcggtaaagaaatggtttccgaagttcttcctctgtaggtgctgacatagtcgcaactttgaagaaacgaggatcgatattcttgatcaccttacttatggtacttccttttccggaagctccccagccttcaaacagcacgatcaccggaatcttatgctctttcagagccatctgcaattcatataatctggttcttgcagcgcttaaacgcactttgatatcctctttttccggaatctgttccgggttccagtttttcaacatctgcatcgtccttccttgaattttttgaatattcatattataccacagaagatcttattttacgataatttttacataattttaacctttagcctcacaaaagcaaacaaattgcacaacaaaaatcattcataagcatcgaaaatctttttaacctcttgacatttttgtcgccgcttcatacaatagacgctgattgttatttttttaacttcataaaaaagcagtgcctgaaaactgttgaaataataaagatcaaggagccgatcatgaaactcacagaaaaacttctgcagaaaatggaacagaaaaaagaactctatggcgatggcatcatcatgccggacggggattaccgtctgatccaggatggacacttaaaaactctcatgtcccttcttccatatacagaaaacgaaatctggaaaatgatccccgatgatgattccgcacttttctggctggtagaaaaaacaagctgcgtactgaccgatgtcaattccacgatcggaatgaagatgacccccgcacagcagaaaacctacgaagcactttccagtcgcgggatcatctctgatgaatattatgatcttaccaaacagcgggaaaaagtaaaagctgcccgggctaacgcctgagcagcttttatttatatctgtcagtcctcatacccttccagaaaagaatgtttcactccatcttttttgtatgcgataactgtatgaagattaacattttccacacttcggaaaatattactttctacatgtggatttaccttcttaagttctgcgatcagattcttgatctccattctcttggaaacactggtaccatctgtacggcaggtagtacaggtatcggtaaatttacatgcacactggataaaatgaaggtcattataatctctccagtgtttgatatctgcctcccggatcagatacataggacggatcagctgcattccctcaaaatttgtactatggagcttcggcatcatagtctgtacctgcgctccgtaaagcattcccatcaggatcgtctcgatcacatcatcatagtgatgtccaagagcgatcttgttgcagccaagctcctttgccttgctgtaaagatagccccttctcatacgggcacagagatagcatggggatttttctatattataaaccgcatcgaagatctcagtctcaaacactgtgatcggaatcccgagaagcctggcattgtgctcgatcaccgcacggtttgcctcattatatcccggatccatcacaagaaacaccagttcaaagggaaacttgttatgacgcttcagttcctggaacagtttggccatcagcatggaatccttaccaccggaaatacagactgctatcttatctcccggcttcaccagctcataatcgttgattcccctggcaaatctggaaaacagctgcttatggaactttttgcggatactcagctcgatatccttccgccgctgttccattgcatcattttcctcttcttcactgttctctttaccggattctttctgcatctgctgaaaaagccatcctgtatatccacctttcaggctcagtgcgggaattcctttttcccggagcatctctgcaccctcctggctgaaaagccctcttgtacagtaaaggaccggtatcttatcccccctcagttcttctgcccgctcttccagttcctgttccggaacagagattgctcccgggatcattccatattctacagttactttatcacgggtatctatcagaagatatttcccccgttctttctctatctggtcaaaagaaatctccagtgtttcttcattcatactgctattattcctttccttacattttcaaagtttctggttcatattgtaagccttcccgtcaaaaacctcaagaagattttcccgaaggttcccgcgttattggaatgctgctgttcactttgttctcaacaacccagcctgtacttttttctgaaaatcagttataatatttttgtttgtaaaaaaattttcaccaaggaggataccggaaatgaaaacacagaatcagactatgctctctgagaatacactgacatcccggcccacagatattattgcgggatttcctgtacgtcccgggttttttgaattaaatggcgctactcctctttccaacggagtcaactttaccgcacatacccgccacggtacatcctgcgagcttcttcttttccactccggagaagaggaacccttcgcagtccttccttttcccaatgcctgtcgtatcggtgatgtctactccatgatcgtcatgggactggacatcgaagatctggagtacggctaccacattgacggtccttacgaaccggaaaagggtcacatcttcgataagacaaaggttcttcttgatccttatgccaaagccgttgccggtcagcgtgaatggggccagcaaaagatcggaagctatcatgcccgtgtggtacgtgattcctttgactgggaagacatgccgcagtccacccgtaagatcagtgacctgatcatctatgagcttcacgtccgcggctttacacaggattcttcttccggtgttatgcacccgggaacctttgccggtcttcgtgaaaagatcccttatctcaaggaactggggatcaacgccgtagagctgatgccgatcttcgagttcgacgagaatatgaatgcccgtactgtaaatggcaaacggcttctggaatactggggatacaattctgtcaacttcttttctccaaacaccagctatgcttccaagccggagcataactgtgagggaactgagctgaaagagctgatccgtgagctccacgaaaatggcatcgaagtaattcttgatgttgtattcaatcataccgccgaaggaaacgagctgggaaaaaccttctgctttaagggctttgacaataaggtttattatatgctgactccagagggaaattactacaatttcagcggatgtggaaatactctgaactgtaaccatcccattgtacgtcagatgatccttgaatgcttacgttactggaccatcaactaccgtgtggacggcttccgcttcgatcttgccagcattctcggacgccatgaggacggttctccacttaacaatccgccccttctggagctccttgcttacgatccggtccttagaaatgtcaaactgatcgcagaagcctgggatgccggcgggctgtatcaggttggttctttccctgccagccgcagatgggctgaatggaatggccgttaccgtgactgcctccgttccttcctgaagggagatctctggaatgcctgggacgctgcatggagtatttccggttccggtgatctgtacggaggcttttattctgatcataatgacaattatgcaggatacaattcctgtgtcaatttccttacctgccacgatggcttcaccatgtatgatctttattcctacaatgaaaaacacaatgaagcaaacggctggaataacaccgacggttccaacgataaccgcagctggaactgtggagaagagggcgattccgccaaccccgaagtgctttccctccgcttccgcatgatacgaaatgcctgtgctgtactgatgtccagccgcggaaccccgatgttccttgcaggtgatgaattcggaaacacaaaacacggaaataacaatacctactgtcaggataacgaaacctcatggatcaactggaagcttctggagaaaaatcacgatctttttgaatttttcaaatttatgatccggttccgtaaagaccaccctgttatctcccggaagcttcccaacgcagtatgcggtatggaaaatatccacacccataacattgacgcaagggatgtgaccattccaagagatgcccacaccttcgctgtaagctttgcaggctatgataagagcaaaggcaccgatgacctgatctacattgtgatcaacgcatactgggaggacgtgacggtcacacttccggagcttgcccgtcccggtgcatggtatctctgtgtcaacacgttcggtgacggaaatggccgttatttctacgaaaaaggccaggagccacgcattgaacacgatttctgcatgcggcccagatccgttgccatctttaccggccgcaattattagaatttatatcaggggcaaaattctttttgtccctgtctgaaagaaatggagtattttgaatggaattaaaaaacagaactttgtccaattttgcagaacttgtagaaacaggtgaatgtaaaaaattccgcggtcgtctgaagacaggcatcgaccttggtactgccaataccgttcttgccgttgtcgatcggaataaccgtcccatagccggaatttccgcaccatcccatgcgatccaggatggagtgatcgtcaattactatgaatctgtccagcttgtgacaaagcttaaaaatgagctggaggaaaggcttggcacagaacttatttacggtgctgctgccatccctccaggagtttctgagggcagtgtcaaaagcatcggctatgttctggagggtgccggtttcgaggttacaaatatcgtggacgagcctactgccgcagctgctgtccttaagatcacagacggtgctgttgtggatgtgggtggcggcacaaccggtatcagcatcctgaaagacggaaaagttatctataccgatgatgaggctactggcggcagccatatgaccatgacagtcgccggtcactataagatcccttatgaggaagccgaagtattgaaaactactccggaaaaagaagacgaaattttccctgtgatcaaggccactgtagaaaaaatggctgtgatcaccgagaaatttctaaagggctatcaggttccggctgtttatgtagttggcggttcttccatgtttaaggaatttactaccgtttttgaaaagaggctgaagcttccggtataccgtccggtccatccgcttcttgttacgccccttggcatcgcatatcattgtgagctgccaaaaatctaagctcttcccggtctggtcctacgattctccagaaggcaaacaacctccactgaatcggtgagcgggaacatatcaaccggctgcatcttctttaccaggtaatctctcttagtaaggcaggcaagatctcttgccagggtttccgggttgcaggatacataaacaattttttccggtgaaagagtcaaaagggagtgaaggaatttacggtcacttccggaacgtggcggatccatgagaacaacctccaccttctctccctctgctgccattccttccataaaccatcctgcatctcccggaacaaaacgaacattacggatcttgttttccctggcattcattctggcatcacggatagcatcacggttcagttctacaccaatgacatccctggcattcccggaagcgatgatcccgatagtacctgtgccgcagtaagcatcgatcaccctctcttttcctgtcattgccgcaaactccatagcctttccgtaaagtacttctgtctgcacaggatttacctgataaaaagaagatggagaaatacggaaggtcagtcccataagtcgatctttgatgaatcccggtccgtaaagtacgatattgcggtctccaagtaccatgcttgtctgtctgtcattgacattgagaaccaccgtagtgatctccggatgctctttacggagagcttttacaaagttattcttagatggaaatattggagaaaccgtaactaataccaccatgatctctcctgtggaaaagcctctccgcacaagcacatggcggagaagtccatatcctgtatcctcatcataggtcttgatcttaaaggatttcagcataccacgtatggtacggatgatctcctgactttttttatcttcgatcatacagtcatctacggaaacgatcctatgactcttctcctcataaatcccggaaattacgtttcccttccgatcacggccaaaagctgcatgaactttgtttctgtaataatagggatcttccattccaatgatcggctctacttttccgaattttttcagaaggccttctgtaattctctgtttcctgcgaagctgctcctggtaggatacaccctgataacggcaaccgccgcatttcttcgcaactgaacagacagtctctttctgttccatttttatctctcctcttttatgggcacaaaaaagatgttcccagttattttcactgagaacatcttatcagaccttttctttttttacaagaaaatccttggcctactcctgatatggctcattaaatacaagaatatgtttcttcacattctcgtaagtaccctggaccatagcctcattgaggtcaaagaaattatgcttgtctgttgattccatatatttctccacatgagctgtcaggctgttaaagcttgctgtggcaatattcaccttacggatgccaagagagatcgccttctggaaatctttatcggtgatgccactgccgccatgaagaaccagcggaatatccactttctcatggatcttctccaatacatcaaaagcaagcgtcggcgctaccggataattaccatgggcattcccgatggcaactgcaagcgcatcaatacctgtctctcttgcgtaaacgaccgcatcatccggatctgtgcagcggataccgtggtcacagcttccatcctcacttccgcccacaaatccaagctcagcctcaactgtagcaccgtatttacgtgctttctccacaacggcctttactctggcgatgttttcctcaaaaggaagcgtagaagcatccagcataaccgatgtaaagccaagctccagagccttgtcaaccgtctcaaaagtaagaccatgatccagatggacagccacatccaccttagcctcctttgcagcctgtaccatcatcggtcccatcaggtgaagcggagaatttttcaaacgcacctccgcgatctgaaggatgatcggagtatccagttcttctgctgcgcggatcgcacctcttaccatttccatattaccaacactgaaagcaccgcagccaacatttttctcttcggcacgtctcagcagatctttcattttcacaagtgccatgattcggccctcctgtcccgtttatcgtacactgtttgcatcttcttacagaaaaaagcggtgtcaaagcactactggctgataccgctttttctatgcaaagcggacatctttattccgcttaactgtacatcagcatgcacctatttccctgtcgtaattataagcctgtcttctcagcaatgaattttcttgcacggatcgcatactcaagcggattagccttagccggatcctgctcagcctcaacaaccatatatccttcgtagcctgcatcctcgagaaccttgaagatcggatcatagttgatgcatccatctcccggaatcgtgaaggcaccggctcttacgcctgcaaggaagctcatgttttctttcttaacctgctcaacaacttccggacggatatccttcagatgaacatgtttgatcctgtgaacatatttctttacaacctcaagaggatcctctccacagtatgtaaagtgaccggtatcaaaaagaagacttacatattcaggatctgtattctccatcatacggtcaacctcagcaaggctctgtacaacagtacccatatgatgatggaaagtaagagcaataccatactcctcttttgcaatcttaccaagcttgttcatgcctgtgcagaaggtatcccactcttcgtcattcatctcatatttatgtccgaaaaccggagtatccatctggccctgaacactgtggctctgctcagatgcgccgatcactttcgcacccatagctttcaggaaagtaagctgtgcacggaacgccttctcaacctcctcaaacggtttggtaatcaggaagcttgagaaccactggttacagatctcaacaccacgaagctcaagagccttcttaagaacctcaggatccttcggatacttgttgcccacctcggagcctgtgaaaccggcaagagccatctcactgacgcactgctcaaaagtattctctttgccaagatccggcatatcatcatttgtccatgcaattggtgcaataccaagctttactttattcttatcaaacattggtcaattctcctttttatttgaattattccataatctcagaaatcttaaccggtctgtgctcctcgctggatttcttagctgcaagacccattaataccggcttcagaccatcataaacattaagaggtgtctctttgtcattaacgatcgcatcaataaatgctgcaacctctttaccataagcgtccatgtatctctcaaggaagaagaacatcggcttctcgcctgtaacaccctcagcattgctgatcactgtggaagactggctgtcattggaaatagcagccataccatcagaaccgaaaacctcggctctctgatcatagccataggaagctcttctgcagttatcgataacagcaatagcgccattctccatctgaagagtgataacagctgtatcaacatccccagcctcaccaatagccggatcaaccagatttgcgctctgaacataaacctctgtagcatcgcagcctgcaagataacgaaccatatcgaaatcatgaattgtcatatccaagaacatgccaccggaaaccttaacataatcaatgctaggcggctcaggatcgcgggaagtgatcttgatgatctccggtttaccaaccttaccagctgcaacagcctgctgaagagactcaaagttatggtcaaatcttctgttaaaaccaacctgatatttcagatttgtgccttcaagagcatcgataacctctttgatcttggcaatgtcatgatcgatcggtttctcacagaaaacatgcttgccagccttgatagcctctacagaaatcggagaatgagtatctgtagaagaacagatcagaactgcggaaatctcagggtcgttgatgatctccttataatccttagtcgtgtgctcaacacccatgctcttagcccatgcagcagtctcatcatttaagaaaggatctgcaaccgtcttgatcaccgcatccggcacccttgttgtaatactagtaatatgaactctaccaattctacctgctccgataataccaactttaatcatagttttgatctccttttgatttattttcccaatgtaatctctttgcgtgtccgaacacgctctttatgcttaatataatatcatcgcaacacacaaatcgcaacccctaatattgtacaatattaccatcttttttctattaaaaatgacgagaactatttttagccacaatatgtaatatttttaggtcaacttcaccgaaaacatctccaacacatccccatacaatcgtcccaaatctcccacaccccaccaccctccaaacatccagcacagcatcacagctcacatcccttccagcatccagcacagcatcacagctcacatcccttcaaacatccagcgcagcatcacagctcacatcccctcaagcatccagcacagcatcacagcttacatcccttcaagcatccagcgcagcgccgatgcccaaactctccctgcaaacaggcgcaaactcagcccttgcagtcgtccagcgcagcgctgacgacccacaacctatcgtcaaacgacattttttctcgctggaagcaccagccgcggaaggggatgctgtctggctctgcttctgcaggaggggagctgattcttggacggcgggaatctgcgttgtttttcaaaagtccgctgtctgagcggcagcaggccgcgagttcggacttttgaaaaacgcttttagcagatttccggcgtcctagaagccagcccccgacgaagccgcagaccagacagcatccccttccgcggcgtccctccgcacaaaaaaaggagacaccccacttcagtgtctcccctccggaatcgtatactcattccttatatatatttccgtaaaaatcttcgccctctccggcgcttccccattaaatagcagccggaacaaaatcatcaccggctcatacccctgtatcctggcatcctgcccgatcaggaaatgaataaatccttccctcatcagctcataattccgccccataaaatcattggcaaccatcttcacctgaccagctttccccgctccggcaattgcctcacacaccccctcctccccatgagaagtaagatatatcccgtcaagatccggaacatccttaaatatcccttccgtaatttccctggccctgccattctcctcaaagcaatactccggcccaatgatctcaatcccaggatacttccgcgcaatttcctcacggaatccaaccaccctgctactcagagaagtattggtactatagccggaaatcacaacaacctttccttttccaccggtcagctcccccataagccccgcagccgcacggccacactgcacaccgttctgccctacaaagcaaagccgtttcgtatcctccacatccgaagtaaacgtcaccaccgggatccgaaattcctctacaaaccggtcaatttcccttttcacacgttcctcatccaaaggaaccatggcaataccacgaacctcttccatccgcatcttctccatggcgagaataacatcctccgcattctgatgctcgatcttatggaccaggactgtaccaccaagattatccacctcagcgcacgcctcctggattcccttcagaacttctttcataaaaggtgtttccgcaccctgcaggatcacgccgatcttaatattatttctgctcatggatagagcacggcccagttgattcggcttataccccatctcatcagcgatggcacggatcctctcagcaacctccggacggatcctgcccctgttatttaacgctctgtcaacagtacctctggaaacaccggcagcttccgcgatctgccttatagtaactcccatactaagcacctctttctatgataatccggattcttttctgtattccgcaggacttaagcccgtaaacttcttaaatgtcttggaaaaataatgataatctccaaaaccggaacgcaatgccacatccttcactttacagttcgtctctgaaagaagcttctttgcacagtcgatccgaagctcctgcacataattggaaaaaccgatcttcatctcctgtttgaaaagataactgagataagcaggattcacctccgccgcatctgctacatcctgaaggctgatcggcgcttcataatgttcccggataaactccagagcttttttcacagcagcagaggtcccctccggaacagcatcctcttcccccacaaaaagctgtgaaatacaggcactgcccttttccctgaatttctcaaagctttcaatatctccataccagatgggctctttctcaattccggctgtctgattcaatttcttaagccactgtaccagaagtcttccgtcggtataacgatcctgacagtcagcgagaacctgtgtccaaagctcctccgctttctttcggtctttccctgccttcagcctggaaatctgcccttccagcttctcagcactttccggtaaaacactgtccgctttcttccgtccttcaaaataaaggatctcttttttctcataaaaatgcagcttcatcatttctctggcctgctgataagcctggcggatcccatcctctcccatgcagacactgctgacactgataccaaaatcacaaagatcctcctgacagtgccggtagcagatcgctgctgcctcagtcagtctctgctgcatagccgatgtcctgcagtctccggaaagatcaagaaaacagcaaaaaatccctgcgccaagatagaccacttccgtaaattcactttctgtcccaagaagctcctccgtacgttccagcagtctgtgacggaaatgatgggaatactgttccacttccagcggcgtccattgtctttccctctctgcccagttctccataaacatacagatcacagcactgttaaaatatttcccggcgattccggcttccacacgcttttcctcacgtgcctgatttttcagcatccccgagatcagtccgttaaaaaaataatacttcagagcgtgacttcccagatggatcagctttctcgtccgtgcctgttcctgacttttttctctgcgcttctcgatcagccgggctgatttttccagagtatcataaagactatcctcgtccagactgttctttaatacatattcatccgccccaaggcgcatggcctcttttacatattcaaaatcatcatgacagctgagcacgataatatagatatccctgttttcctcacggatctttctgatcagctcaattccatccatcacaggcatggtaagatccgtcacaagaacatcgattttttctttctgaaggaatccataagcttcctccccgtcttctgcatcatccacgatctcatatcctgctttttcccaggaatccagggttttgagatagctccttacaagaaaatcatcatctgccaccagtgttctgtacattaattttttctcccttcttcaggcatatcatagatcgcaggcagaaataccgtgacctccgtaccgtttccactgcttacgtattccattcctccctgtgtcccgtaataaagctccaggcgttcttttacatttggaatccccactgcggaaagtccgtttgttttttttgcatgactgttaaaaagatctcggatctgctcttttgtcattcctctgccgttatcctttactatgaggatcagctttccttcacttacgtttccgctgatccagatttttcctgtttgtcgtttgatgtcgatcccgtgaagaagagcattctccacaagcggctgaaggatcagtcttggaatatagcaccggtatgcttcctcagagatctcatatttcacctgaaagcttccctgatagcgaaaatcctgcagatggatataatttttcagtatatggatctcatcggcaacagaaaggaagcttccctttttgttgatactggcctgcagaagctccacgaaatctccaataagccccgccagctctttttcccctttcagaaatgccgcaaatttgatggagttcaatgtattatacataaaatgcggtgtgatctgatactgcagtgcttccagctctgcatcttttttctgctgttcctcttcgatcacctgggcgatcagagcttcgatataatccagcatgtggttgaattcttttccgagggttccgatttcatcagcagtagtcacttctgtacggaggctcaaatctccctcaccaaccttctcaaccgtgccagtcatggatctgagcggtccgcagactactctggagagccacagtgccagcagcacagctgccacaaaaactgcaccaaatattccgatcagaaagagccgcatccgggaaagtccgcttaaaacttcttttttcggtacctccagatataagccgcagtctgaaaagctacctctgctgaaaaaagagatcacaccgtttttttctgcatagccttccattttcggaacattctggtctgtaatctccggaaatgtttttccaatgtcactgtagtctccggatgtcacgatttcatcatttctgtctaccagaactattctggtgatcttttcatcattgacagcttccagatattcgtaataaattgcccgttccctgatgtctgcgacaacataccccagaatctctccgttatcatcctctaccttctggatcacagaaagaaagctgccgccttcatggatcggagattccacaagaaccggaaaggaatccagttcctgtattttttccaattcctcgatatgttctcctgaaatcccctgcttgtttaccggaaattcctcagaagtcacagccatttttttgtctggaaagacaaagtaaagggagttgatatctttatattcccgactgtgttcccggagaagcccggccatattttccaggctgttttcatttcctgtacagctgtagtccttcgcattattccgtatatctgtatcccaggcagttctcgtattcacataataaatctctttcagggattcgtccagatcttttatagtctgctgcatccgtccatacaggatacctgaataattttcttcgatcatccctgctgcccgaaaataaaataccaccgtaagagaacaggcagtaaacatggttactgtcaggatcgccagtaatatctttgcccggatactttttaacatagaactcctcccttccgtaaagcggatatatgcctctctatgctatatgcccataaacgcaggaaacagcaggagtatcctacccctgcctgatttcctgtttgcggttgaatatatgttttacaataaaatatttataactgtccgtgtgcctcgcgctcggtaagctcctgcatgatcgccggatacattttgtcaagcttatatccgaaaagcgttacaatgatcactgctgcaatgaggatcggtccaaatttataaagagaaacgatcatctccagtgctgtttccggctgtgcagttattcctgcagatgagcttacatatccggaactgcttaaaagacctgtgatcactgcggaggcaagacctgcgccaacttttgttccgatggagccgcctgcaaagatcagactttcctgacggatatggtttttccactgtccgaactctactacatcaccaaccatactgaatacaactgcgttcagtggagcaagtccgatggcacgtgtgacacagctcataaccatgaagccgaagctgtatggattcaggaaaaacagaatctggccgccaagtgcaacaaatccaccgacaaatgcgatatttctttttccgaatttcttgatcaacggtgagcagatgaagattcccactaccagaaccagggtttctgtaaggaacagtgcgctgtacatccatgtatcattgttgaaaatatatttacagtagtacggaagaatggttcctgtgatcgtaaaggatacactctgtactgtccacagaagcattactgcccagaaatactgatttgcaaaaagtgccttcagcattgtcggaatcggaagcttctcatctttctttcttgcttcgatctgaaccttttcctcacatctgaagaagcagagaagcagaagtgcaagtgcaagcactgcccatacactcataaccttgatccatgcagcctgatcatttccaagaagctttacaagcggcagtgtacaggttgctgcaacgatctttccgataggtgacagtcccattctcaatacactgagtttatctctctctgatgattcgcggatcatcattgaagaaaggcttccatatggaagattgatcgctgtatagcatatggtcgtacagaagttataggttacaaagagatacagaaactgaagcatccctgttgtacgcggcactgtgaaaagcagtactgctgacagcgcaaatggaatgctcatccacagaagccagggtcttgattttccccatttggaattggtcctctctacaatgacacccatgaccagatcggaaaatccatcaaagcatctggaaagtaacattaccagtcctactgttgctgcgcttatccctacataatctgtgtaaaacagcgtcagcagtgttccgatcattccgaacacgatattacatcctacatctcctccagcataacacagccctgttgataccgaaagttttttcttctccatcttattatcccgccctttcatttcttttcgttttttattttcgctttccttttgatgattctattttatcgaaaatacgggattatcatagtatgagaaattttagttttttcggtattatttttacctgactgttaaatctgtaccaaagtttttctgattctgatatctctacatccttcttttgtcctatttttatgttttgtgttttatttttggataccagcctgactttttaccgaatcagtcaatgcctctgccggattgtaaaaaataataagcagcggatggaaacctgcttgtatcagggatgagaatgtccgtcatccttcatatatgtatcaatattttcttcggtaagcacctgggaatccagaatctcatcttctcctgttccatctccctccagatccttcacaatataccggatggtttcataaccaatctgataaccggactgcgcgccaagcgccacgatacgcccatcctgaaccgctttcaaggcatcttcctgagcatctacggaaacaatagaaatctcccgtccttcagttgcctctgaaagtcccagggccgtcactgcacttgtggccatgattccgttaagatccggatacttcaccaggatctcatccacatccttctgggaaacccgcatattgctgtatccgttccgaaccatttcaatggtgatcccaggctctttttccatatatttttcaaatccggcaacacgcatccggtgtccagcctgcttaaaatcaccggcgatcacgccaatctttcctttatgatccagagcctttgcaagctgctcacccagctcatagcctagtttttcattgtcaattccaatataaggaatttctgaatcctctatgggagtatcacaggcatatacagaaatccccttttctcttgcgaaatttaaataatcttcgcattcataggaatctataggagaaactgccatcgcctggatatcggttttcagaagatcccggatcatatttttctgaacctcttcttctgtttcggaatccggggacagaatcaccacatctgcatgatatttttctgccgcatcttccattccgtcgcagacagacaaccaatattcactgcttttagattttgtaacaacaccgatcgttacctgctcttcttctgttttccttgcagaagacccgcatccggaaaggctgcaaactcctatgactgccaccagaatacagatatacttttttctcatgaaggatatgcctccttttcttttgcagctatatttgccacgggaaaaaagactccggagcctttttctccggtccggagtcttttcctatctggcaatgcagggtttacatttacattttaccagagttttctgtagatttcttttacttcctcttctgttacatcacgcatggtattctgaggacttccactgtccatggcatcatgtgccattttgtcgatgacgttgaagaactcttctttattgataccgaactgctccagagtcggagtatccagttcatttacaagtgactctactgctttcaggaatttctcagctgcttcctgatcagaatcagttgcatccgccacaccaatatcacgtcccaacgctccgaatctgtcgtatgctccgggaagcgcaaaggtaaggcactccttcagaagcatggcattggaaagtccgtgtgctacatggaacagtgctccgatcggacggctcattccatggataatggtaacagatgcattgttaaatgcgattcctgcctcaagagcagcgacagacatctgtacacgagcttcttcattctttccgtctttatatgcaaccggaagatatttaaagatcctctttactgcagatactgcaaaagtatcggaaagtgtctgtgcttttctggatgtataagcttccacacagtggcaaagtgcatcaagacctgttgctgctgtgatctttggaggtgcagtcatagtaaactgcgggtcgataatggcaagatccggcatgagaactttgcctttaagaagcatcttgatgtcttttttggtatccgtgatgatcgtgaactgtgttgcctcagatcccgttcctgctgtagtagggatcgccgccattggcggcatctttacatcgatcacttttcccatgtagtcggaaatacttccaccgtttgctaccagtgagccgatggctttcatggagtcaatggggcttccgcctcccagagctaccaggaagtcacagttctcatctttatagatctgtaagcctttttcgatcatggtatctgttggctcaccacagatgtcagaataaatgctgtattcaatgccctgatttgtcagcgccttctcaacttttgcacagtttcccaggtcgatcattactttatcggttacgatcagagcttttttaccaaggagtttcagtgctccttctgccatgtccagtgctccggaaccggaaataatttctccaggtacaataaattctcttgccattgtcaaaatctcccttcagtcagtacaatttttttcataatagcagcaggtctactgctgtccgctcctcacggacaacagcattttcctcttcctgctgcctgttatttacgatccagtatcagtatctccgaatccttaaaactcggcgtcatgaagccaggtatatctctcatcctcgcagcggtctgtctgcagccacggatttccgtcaatgtggcggatcatccagcatgtatacatctgatatccaggtgcaactgcctgcggatgaagctctcctcctgggattgcggaaaagctctcgtctgtactcttaaatacctgatcaccgacaaagcttgctccaaacccttccggatgatcaaatttgaaaaagtatgtctcaggctgcggatgtctgtgcggcaggtatccggaccagtttcctctgtcattgagaacctcaccaagtaccatattggactccggtgaaatgtcatgatcgaagatggtgtttactcttctcttcgcaacatttccgaacttgcctacgcaggaatatccccacggagcatcttccggtttgtagagttttgcaccgaaatctttctcgttctttgtgcactgaacaaggatctgtgactctgcatttgctacaactgtaatctcagttcctgtgcttccgtgaacacaccatggtccctctgtgaacacgtcttttctggttgctgcagcttcgtttccgttccatttataggtaatgtttccggagaggaggagaactgctgtctcctcaccctctcttaaaaatgttcttgtctctcctgctttcatacggtaaacacggatgtccatcatcatggccttgtactcattatcgtatgttgtaagaatcttttcgcctttttcgtcatattccggataaccaaatactttactcattttcttacctcccagattagtacagtcttgcctcttcacggcctttcataactccctcgcaggcctttcttacgctttctttctcagatgttgttgcgattcctacatcccaccaggactcatatccgtctgtcatggtcttcgggataactttgagatcaaagaggcatgcgatctcctgctttttggcatcttccagagcgtctaccaattcctggatggtgcggcaggtataggtcttcagaccatatccttcgccgatctttgcataatctacagggatcagatctccggtcggtttcttgccgtctgtataacggaactctgttgcaaggcttccgattccgtggttcatctcaaggttgttgatgcagccaaatccgcagttatcgaataccatgatattgactttctgtctctcctgcatgatagtcatgatctcactgtggagcatctggaagctggaatctccaactacgcagtatacttcattatccggctcagcaaatttcacaccgagggtagcggcaacctcatatcccatacaggaatatccgtactctgcatgatatccgccacgtttgtctgttctccacatacgctgcatacagcttggaagggaaccgcctgctgtgatgatggttgcatctttgtcgatagttctgttgattgctgcaagtgctgctgtctgtgtgatctttccgtttgtaagctttacatattccggaatcgtacgaggatctcttgccttgatcagcggctcaaaatcatctcctgtgtactcaatgcttccaaggcgctccatctctttatcccatgcagcttttgctttctcgatctcatctgtgtatgcagatttatatcctcttgcacgaagcttttctgctagtgcttctacggtagcttttgcatcacccactgcttttactgcatccatcttgtatgcgtggaatctgcagttgttgatacttacaaactgaacatcctcattctggaacagatgcttggagcttgttgtaaagtcagacattctggaaccgatagaaattaccacgtctgcgtctttaccgatgatgttggaagcgtaggttcctgttacaccgataccgccaagacagtacggattgccagactggcaggcactctttccggcctgtgtctcgccgaatgggatcttgaactcttcacagaatttctcaacagcttctccagcttctgagtaacggacaccaccaccaacaacgataagcggtttcttcgctcctgcgatgacctctgccacatcctcaagctcttcctctactgcaaccggtcttgtgatcctgtgcactctcttcttgaagaagtactccgggaagtcaaaggactcaccctcaacatcctggcaaagcgcgatgcagcatgcacctgtttcagccggatctgtaagaactctcattgcattgatcagagcggtcatgaccatctccggtcttgtgatcctatcccagtatttgcagactggcttgaatgcatcgttcgtactgacggcaaggctgctgctctgctccagctgctggagaaccgggtcaggctggcgagatgcaaaagtatctgccgggaatacaagaagcggaatattatttacagttgctgttgcacatgctgttaccatgtttgcagctccaggtccgatggaggaagcgcatgcaatgatttttttgcggttgctctgttttgcaaaagcggtagcaacgtgacacataccctgctcatttcttccctgaagaaccttcagctgtcccggatttgtatccagtgcctcaccaagtcctacagcaataccgtgtccgaagatcgtgaaaaatccttctacgaattttgtctccactccgtccatggaaacatactgattatccagaaattttacaattgcctgtgcagttgtcattcttactgtctttgccattttttccactccttttctttatactcttgcgatcatttcgccgaatttttctttttcatctttaatgaatgcgtgaacttcatccggtcccggaagggaatcggagcagttgttgctcttaaccatcatggatgcctcagcagaaccaaactccaagcagtcaatgatctcccaaccctgatacagtccatacaggaatccggagccgtatccgtcgccgccgccgaagccttttcttgcctcaaccgggaatggcttgatgctgaacttctgtccatcaactgtgtaggctgtggaacccttcataccgtgtttgatgacaacgatctttgcattttttgcctgccagtaagctgcactctcctcatcagtcatgccttctttgatcagtttctctgtaaggtcaaactcttctctggagcccatgatgatgtcagcttccttagctacgatggaatagtagatggaaatctcatctgcattcttccagttgtactctctgtaatcaatatcaaaaatgatctttgtgtttactttcttagcaagcataactgctttgatcgctgcttctctggaagggctctctgcaagagcagttccggaaatgaggatcgcttttgcatttttgatataatcctcgtggatgtcgtctacatgaagctgcagatctgcgatacggttacgatacatgaggatactgctttcctttggagaaagcatctcggtaaaggtaagtcccagcttctctccgtttgtacattttgtgatctgtgaggtatcgattcctctctcatcaaaataatctacaacatactcaccgaactgatcatccgaaacctttccgataaatcctgctttcaggccatgcttggtaacacctacagcaatgtttgcaggagatcctcctacaaatttctcaaacatatgtaccttcttcaggggtttgaactcctcctttacctgatcgttgtaagcaggattaaaatcaatggcaactcttccaaggagcaccaggtccattggtctggattcatcaaattcgatatacttcatgatcttacctccgtttgtttgatggtttattttttacttcttttttatgtgcttttttgatttgcgtgctttttcttttatttagcgtgctttcttgcgtgtttcttatgatgttaatatagcaccgttttacaatttgggcaagtacttcttttcatttttctttttttcagttattctatacaatttttgtagttttgttttgttcaaagtagctattatctacatgtgcatttgcgtgtttattttttttggcacgctattggcacgcaatcaaatgtatccagacagtcgttttcttggaatctatattccatatcgtagtatcttacagatttcctgtaatataaaaaagcctgcagttttcatcctgcagactattttatatgatactttgcacaatacatgttcaaaggttatattttgttttgatcttgatatctgtaaagagatattctctctccggctcctgtccttttgtcaggatatccgccaggatccttggcggttcatacccctggacatatccattctggtcgatcagaaaatccacatgatcattcttcagtgcccgttcattcttcggagtctgatcgtagatcacaacgtagggcctgcggtcaagtctcagcttttcaaatgccttacccactcctgcctggcctccggataccaccaggatcccgctgatccctgaagtactcatcatggcattttctataatgtgctccacctcagctgcttcatcaaagcttccgtgaacaccggcaatctccagatgtggaaaagcccgcttggcttcctctacaaagccatccactcgctgattgtcaacatgattgctgaaatatccggtgatgatcaggatctttccatttcctcttgtcaacattccaagaagtccggctgcggtacgtccgctcttgcggttatccattcccacaaaacaggttcttctcgttcctacaatatcagagttaaaggttactactgggatattcttctcttcgatcaaagcattcagtttctcccggacagtctcactgtctaccggcatgatcgcaagtccccggattccttcctgttccagttcctcaatggcctgcagctgttcctcttcatcaacggaaagaccctctttcaggatcagctggatccctttttctttcagttccacggctgccttctcaataccacgatttacttcctgcataaaagaagatctggcaagctgtgtcaccactccgatcttcagtctttcatctttagctgttctggaatgtttccgttctttctgtacatatcccatctcgtccgccagacggcagattctctctgccacctccggattgatccgtcctctgtggttcaatgctctgtccacggttcccctggaaacccctgcctgttctgcaatctgctgtattgttaccgccataaatccttctcctgcctctgccttactgtgtcgttgccaactgttccgtccggcaataatctttctatatacatttatatagttttttcgaaaaggtgtcaatatgtaagtgcattatacaaggcaaccaacccgatcttatccccgcacagccatatgatatacttctttataagaaatccctgttttttcacaaagtttttttacgctttcgtattccggataataatattcctgtccgtcaaaagtgcagaccttcacttctacatttcccagcggggttgtaaccgttcttttctctcttttcagaatggttctctccatctcctggcgacggatcccaatggttgtcgtttctctgaaaatgatctgctccatcgctgaaacctgttcttttttacatagaacggtaagcagccatgccggacggtttttcttcataaacacaggcatgtaattggcctctctggctcctgcctcatacagaagctccataacatagccaagcgtttctcctgtacagtcatcaatgttggattccagctttataatggtgtctatttccgtacaagcatcattgcctgaagcctcctccccggattcccggattagcatggcacggagaattcccgggcactcatactggcgcttgcctgctccgataccgatcttctccaccgtaaaatcttcaggcagtttttctgatgtaaggaatgccgccacaatggctgctcctgtaggcgttatcagttcaccctgcaccgatgtgatatgcagcttcagctgatgagcacttacaatattacttaccgccggtaccggcaccggaaggattccgtgctgacagcgaatcgttccgctaccctcacaaagtcttggaacgatcacttcctccacatccagatcatccatacagattgcaacagaaagaatatccacaatggaatccactgcacccacttcatggaaatggacccgatccaccggtacattatgggcttttgcttctgcctcggcaagaatcttaaaaatcctttttccataggatttcgcacggtctgtcatatccgcatggtcgatgatctccatgatctcgttaaggccacgatgttcatggtgatggtgtccgtggcgggaatgcatcgtttctgtatatgtatgactgtttccatgggtttcctgtacatgatgttcatgagaatggggatgctcatgggcttccaggacttcatgactatgtttataatgatgtttctcatgatcctggctgtgagaatctccatcatgtccatgcagatattccatatcgtgatcgtgattttcatggtcctgatccagcatcacatcaaaatcacaggcatcgatcccggattttaccacacggctgatctttatgtcgaagccttttaccggcaggctttcaagagctttctccagttttttctgatctgcacccagatccagaagagccgcaactgtcatatccccgctgatcccggaggtacactccagatataatttgtttctcatttattttccctccgcaagccgattgatctgggttgccagatatcctgccccaaatccgttgtcaatatttactactgcaattccgttggcacaggaattgatcattgtcagaagcgctgacaatccatgaaagctggcgccatatcccacagaagtaggtaccgcgatcaccggacgtttcacaagaccacccataacacttgccagcgcaccctccattcctgctaccgcaaccacacagttagcctcctggatggtatccagcctggaaaagagtctgtgcataccactgactcccacatcatagatcctctccacatgtgtgccgaaatactctgctgtctgggcagcttcctccgcaacagaaatatctgctgttccggctgtacacactgccacctttccgatatgctccttctctttttcaatcttcaaaattccggaaacaggatcataaaccacatcaggaagaaccttttttaccagttcatactgatgttctgacgcccttgttccaaagacttctccatcttcctcataaagcttctgatagatattcaaaagatgttcgtctgcttttctcgcacagtaaactacctccgcaaaaccggtcctcgcttttcgggtagtatccagcttcgcataatccatttcttcatatccctcttttttcagaaggtcctctgcatgctccacagagagctggcctttttttacctcttcaaggatctgctgtaaagtcatctttttgcctccctgttttcttcgtaatataataacacaatagccagacatttgcatcatttccgcaaatcgtctggctatctgctattcaaaccgttcactgtccggttctttttatttatgcgactgcctaggccgccttctgttctttatctgatcatctccgtatatttggccgagatctcatcaatatctccatatgcgatcagttttcctttttcaagtatcattgctttattgcacaagcgctgtacctgttccagagaatgggatacaaacagtaccgtaacgcccttatcaaacatacttaagactttcttttcactctttttccggaatttggcatctcctacagaaaggacttcatccaggatcaggatatccggtgataccagtgtggcaatggagaatccaagtcttgccttcataccggaagaataattcttaatagggacatcgataaattccttcagttcagaaaactcaacaatctcatcaaatttcgattccagaaacttcttggaatatccgagcatcgcaccatacagaaaaatattctcacgtcctgtatactgcgaatcaaaaccggctcccagttccagaagagggaccagacggccgtttcggaccaccttgccttcggtaggcttgaatacaccggcaattactttgagcagagtactttttcccgctccgttaagtcccaggattcctacacggtcaccttttttcacctcaaaatcaacattctgaagagcccagaattcattatatttaatttctttttttaagaatttaatcacgtaatccttcaggctgtctaccttttctttactgagattaaacttcatacttacgttatctacaactactgcaggtttttccatatttttctcctgttaaatataaaggataaattcatcctgtttcttcttgaaacagaacattccgatggcaatcgtcacaaggctgaataccagtgcgtatgccgcataatgcaggttcatcggctctccgaacattcccgaacgaaaaacatcgatggtacagtacagcggattatatttcaggatccatgaaaaaccacttttcagcagtctggacggataataaaagatcgcacaggtatacatgatcagcatcagcgctactgaccacagatattccatatctctgaaaaaaacgccaatcgtagcaaggatcattccacaaccataagacaacagaaataccaggatcagcgcgatcgggatctggagcatataaagtgtcggctccacaccaagtactgctcctaccggaaccagcacgatcagtgagatcaggaagatcacatagttaaaaagtacacttgacagcggatagagatattttggcacataaactttcttgatcattgccgaattcgctcttactgatttcaatgccgcttttgtggcactggaatagaatgtgtacaaaagacgtcctgtcaggatatatacaggaaatgtccgatccttgtttccaaacagggtaccgaatacgatcgtcagtacgatcatggtaagcaacggctcaagaagagaccagatgataccaagataggaacgtctgtacttcagtttgattcctttttttacaagctctcccagaagaaacctgtaacgcataaaagtatttacgtattctttcatagcatctccaatattcaattttattttttcacacggctgtaaatcataatatactattttgagaaatctggcaaccttattttcgccaaaaaaaggcacgccaaagcgtacctttttgagaaatgtgttagttatgatcttatctcttgatattgaatgcccgaaatcccggatatactgctgcatcaccaagctcttcctcaatacggagaagctgattatattttgccacacgttcgcttctggaaggagctcctgtcttgatctggcaggtattcagtgccactgcaagatctgcaatggttgtatcctctgtctctccggaacgatgggaagaaatcgctgtatagccagctttatgtgccattttgatggcttccagagtctcagatacagaaccgatctgattcagtttgatcagaatagaatttccgcagccaaggctgatacctttctcaagacgctctgtatttgtaacaaacaggtcatcacctacaagctgtacttttcctccaagttcttttgtcatgatctgccagccttcccagtcttcctcatcaaggccatcctcaatagagtagatcggatatttttcgatcagatttttccagtgatcaacaagctccgcagatgtaaatttctttccgcatttcggaagaacatactccccctttttgtttcctttccactcactggatgcagcatccatggcaagtacaaaatcctttccaggctcatatcctgcttttttcactgcttcaaggatgtactcaatggcttcctcatcgcttccaaggtctggtgcaaaaccgccttcatctccaacgcttgttgcaaggcctttttctttcagaagtgcagcaagagcgtggaatacctccgtacaccagcgaagtccctctttaaagcttggtgctcctgccggcatgatcatgaattcctgaacatcaacggtattcgcagcatgtgcaccaccgtttaggatattcatcatcggaaccggaagtctgtttccgttcaccccaccaagaaatctgtaaagggggatgtcaagagaaatcgcagccgcacgtgcgcacgcaatagaaaccgcaagaatggcatttgcgcccagttttgatttgtcctttgttccatctgctttgagcatggcagcatccactgcataaatatcagatgcatccattcctgccagcgcatcattaattactgtattgatattttcaatggccttcgaaacaccttttcctccaaaacggcttttatcctgatctctcagctcaagtgcttcgaattctcctgtggacgctccgcttggtgctgctcctcttccgaccgttccatctgccagataaacctctgcctctacggtcggatttcctcttgaatcaataatctctcttccaatgaccttctcaatctctaaataatccatttgatatttatcctcctgtctggtcttttcgccctgtccgtaactcctgttcaagccgcattttgtcaggggatacggcccgccacaaattttacgcattagttagaatccgctaactgtttacaagtttactatatctaactttaacagtcaagaggagttattgccatttttttctcaattactcttctgatatttccatgttttttcagaacattccgcaggatgttgcgaattttacttattgacaaggctttactacttatgatatcataaccgccggtatcaagcggatattcgtaaaccgctctgctgcctgcttacagccaaataactgcttcgcagtttgatttggtcaaaaaaccgaatatggtttatgacaaaatcctgtcatatattggaaacgcacattctcctgaatgattaacgaacaacacatgctctgaggttttacattatcacttaatcattttaaaggaggatttttatgccaaaaaacaaatttcaggaagttatctttacccttatcatggtattttttatggtttacgccatgatctgctacaacatttccctgaacacagggagtatgacaaaccgcgtgttccttgacgcttttcatgagctggtgatcatgggaccgatcgcatttatccttgacttcttccttgtatccaagcttgcctttggttgtgcaatgcgcatggtagatttcaaaaactgccatccgttcagcaagatccttgcgatctccgttccttccgttgctttcatgtgcccattaatgagtcttgccgcaaccattctctttaaggatgcaggaaatcagttcgtagctgtatggcttcagacaaccgcattcaacttcccgatggcattcttctggcagctgatctatgcaggtccgatcgtacgttttattttcagacatatctttcctgaaaaggaaaacgcaaaagaagcgacagcaactatgtaaaattaaagaaagcacattgctatggttgaaccaccccaaaagtcatactttccggtggcggctcattccatacaatgtgctttttatttttcacgcgaatctttctcatcggatcttcgaatctctcagactgttttctttaattccggcatcttaagtatcttcacgatcagcgggatcaccataatgacccagactatcggttctgctacgatcacgccggtatatccgagaagtggcaccagagtcaccgcgatcactacttttccgatcatctccagcgcactggaaaccagagggatcaccgtttctccaaggccctgcatagcatttctgaggacactgatcacagccgttacgaaataaaagatcgtatcaaatttaagataattggcggcattgcggatcaccgtttcattatggcttcctgtgaccagatagatcagctgttttccaatggtaaaactgaagatcacagtcatcacggaccagatacaggtatacagaactgcaagaccgattccatggcgtacccggtccatcctccctgcacctgcgttctggccgcagaagatcgccatggtctggccgaacacgccaaacatgatcataaacatctctgtgatcttacgagctgctgtatgtgccacaatgatatctcttcccagccgattgatggaggtctgaagtgccagtgtaccaagatttacaagagagcttacaagtcccatagaaagtccggcactcagcatatttttcatcatatttctttcgagaccgaaaaaatccttttttttcagccgtagaatctcatacctgcggatcatgtaaaaccagcatatcagaaatgccagcgtctgtgaaagtaccgtggcaacggccgctccctgaactcctgcttttactaccagaataaaaaacagatctcctgcgatatttaaagttacagacaccgccaggatcacaagaggcgtcaccgtatccccaagtgcacgcagagatgccgcgcaggtatcataaagaaacgttgccagcatacctgcgataataataaagatatactgcctggcggttcccgtcaaatgatccggaacattcaggaacctcaggatcggatgcagaaacaaaagtcccaaaacagtcaggatcagagaaatcacgctgcccattacaagagacagcgcaaaggattttcgtacttcttcccggtttccggcaccgaatttctgtgcggtgacaatggcaaatccatttgcaaggcccatcagaaaaccgatgatcagcccgcttaaaggactggtggcccctactgccgccagcgcatcttctttaagaaagcttcccacgatccgggtatctgccaggctgtacgtcagctgcaagagatttcccagaaatacaggaagcgcaaaggacaggatcaatgtggaaggcttcccttttgtcaagtctttcatgtcatcctccctcagtcaacgatatcattctgaaaacgggaaagatgctcataaggaaggatcatccttccgcggaacagtccgcagccatcattgatcaggctgttgtttaccgcaccaaacatattaacgtccagcgcagcaagatccagtccaagaagtcgcataccccgctcataagcctcatcaaaatagatacattccccctggggaatcgcgtcccttctcctgcgttcactttcctgttttttctcatagcttaaatggttggcggaaccaatctccgcaacatcatccatgtctttggtccgcagctgtacttccatatagcttcgggaactgttatcataaaacgtgatatgcagggactgataatcatcctcactgttattacagatgtaatccctatagtaaggctttgcttccctgctgagcagtggcgatgtactttcctgcactcctctggccggctctgcggtaaatcctctttcttccagaaatcccggaagtatattggcgatctcataaagataacgaagctcttcttctctgacattctcaccatttttcagatgacatctgggcatggcgataacgatcctgtaagcaataaaatcgcggaaacagcttaaccgttccttgatctgggatacggaaggatattccccatattctttatagtagtcataaataaattctactacatatccgttaaatttttcctccgcacggatcagggatttgattcttcccttgaaggtaaacgccagaaacggatattcccctgccatatatttataaaattcccggatcttctgagactgggcagtgaggaaatcattatgctccagaagctcctggatctggatcaaaaaattacagtgtaccagatcgatctcattatgtttttccttcgcctctgtcctaagatcccgaatgtatttcttcagtatccggagaagagtatctccggaatacagataatcgtttaatgttatcatttgtgtttctcttttctattttggtcttttcaggatcacatatttacaacaactgctggatgatctgtgttcctgtcttttatttatttcagtttttcatggaaaaactctgcgatccggttccacacctcatcctggaaaaactggatatctgcatggtctgcaccatccagtgtcagcaaagtgacatcacagtcttttttctccagaagtccgtataaagtttccgactgaacataaggaacgacctgatcgcagttgccatggatgatcagaaatggcggtgcatccttcgtaaccttggaaaccggactgctctggtatgccttttctttatttaacatggaattaaatccaagcagaagggattctgcggaagaagcacatttttctgcagattcacacggaaatgcggaaagatccgtaggcggataccatgggcaggcagcctgtaccttacttgattcttccagatactctcccacatccagagccggatcattgtccagcgcagccatacaggtaagatatcctccggcagactctcccataactcctatctgctctttattgatgcggaaccggtctgcatgggctttcagataacggatggctgcctttacatcctgcagcggcatgggatacgggccctgattagaagtacgatactccacacttgccactacaaagccactggatgccagtctgctcagataaagattatgtgcggatttatccatcatcagccatgcgcctccacagatccagaggatgcagggatagatttttccatcttttgtttccgggtagattatatccagtttcagatcccgcctgcaatgtccgaaccaggaatccacctgtgcgtaagtaatatcatttactgtaatatactgaggcttctctaccgaaagcttcagtgtctttttttctgcttttgtcataatctatctgcctcttttcttctgatcattttatctttgaaatatttttcttttattttatcacaatactgctttttctgcttttattttccggagaaaaagcactctttttctgcaaaacagggttttgatctttttgttcataaagtcctcctctttgtaagtaaaattgtttgtcaacaataacaaaaagctgttataatagattttctctattacaacagctttgttttcctacttttagaatggatttattatattataagtttttttctctgtcaacgccctcagacaatttcacagcttttctttatcagtaaacctgtatcctgctttctcagatctgataccagcggatctcattagcttccagatgaaggtcaaagctctttccatcccctgtgtaaaccgtagtgtcctgtggctcataggtgttgtttaccacacaatactttttatttttcacataagcatgtacttccacattataattggaagaaaaccagcagaaaagctcattttctgccgctgctgaccagagcacagcacgataaaggatacggctgttgcagaagctgtacggaagtccgctgatgtaaacacctctgccttttccgaaggtttttactgccatctggacttcctgatctttctggataaggatcttcgtatccggaagtgcgaagatattctttttcccctcaccgaaatctacggttccgtctgtatccttcaggataaaatgatctttatgctcttcccagttgtatttatcggtattaagattaaatcctctttcttcctctacaccaaggatgtcatccagctggaagaattttccctgccactgatgagctgccggttcaccgacgccaataaatccgccgccattatagacaaatttccgcactgctgtaaggatttccggatctgcccagttctcaccaccggactgtgcagtgtccgcatcacctacattgatgatcacatcaaaatcattcagcagctctttatcctcacggatatcgtcaaagctgataaaggaaacatcaaaaggcgcaccacttaatgcctcgataattccgaaataggaataattctgcttgtaatagatggcatgatgtaccatatggttgccccaggagcgcatttttccccagcaatttaaaactgccacacgttttacgcagtacggtgtggttccctggatattgtcgtagagcacacggaattcctggcagacttccttgatatactgtacaaaatccggaaattccagagccagcttcagataaccgccgtatccaattctctggatcgggcttcgaaggatagctcttcttgcagtcacccagtttacttttgcctcttttacaggatccccgccctcatggaaggtgtccgggaaaaagtacggcagaaatcttccctctgtatattttacatgtttaatatcactgaacaaacgtaaggtcgctccgtttccgacgcttcccactaccgcatccagcccgatggaagcaaactcatccataaagggctccataccgatccagtgatcgcccatgaacatcatggcctcttttccgtattcatggacaatgtctaccatttcctttgcaagcttcgccacttcccgtctctggaaagcctggaaatctttaaattctttcgacgggatccgataagtgttgttcatatatccctgatcaatgataaactccgggcggaacttatatcccacttcctgctcaaactgtttcaggatataggggctcaccgaagcggaatatccaaaccagtctacatatttttcccgtgccatctcatcaaagatcagtgtgaactggtgaaaaaatgtagtaaatcgtactacattcacataatcatgggaatccagaaatctgcggaggcgatccatggaatgtgcacgtgttgccggctgacgcacatcaaaagtgatctgaggttctacatctttccagtcattgacaactgcattgtacatatgtaccggatcccacatgatatatgcaagaaagcttaccgtatactcatgaaactctttcgccggcctgatcacaacatttccgtttttttcatcgtatgaccattcctctgtactgacagcttcccctgtagtccggtcaatgacttcccaccatcttctgatatcatctcttgtattcacagccagcatatccggatacagatgatccatcagatggatctccagggtatccgacactgccgtgtgaaaagatgtcatgatatacatctgctggatttcttccggatgggcctttgcccaggcattatcctttctggtggtataataagttgcataaatctttgcgccggttttcttcagttctgctggaaattccgttccgtcacagtcacggatggcatctgcaccccactcatccagcattttcagtgtctccggaatcacatccagatctgtcggaatagtcactcttccttttgtttcgctcatcgctttacctccattgtaaaaacccctgttttttatttctgatattttttcacgatcgtctgcatagtatcccatttctgttccatatctgccaccagcttaaactgtgtgcggcagcggtccagattatgttcttcccggtcgatcttaaaataatgatctccttccagataatcggtaagaaagcgaatgccgcattcataagtcatcaccttagctcccatgggaagcatctcgatctcttttgcactgagcttatctccacagctttccagaaagccttttacatagatttcatagagctccatatcacaggaaactttgcttaaatctttctcatcctccaatgcagtgctggccccgaaacgaatggaatctccaaaatcattcatagcaagtcccggcataaccgtgtccaggtccactacacagattccccttcctgtttccaggtcgatcataacgttattcagcttcgtatcgttgtgtgttacccgaaggggcacctcaccttttgccagaagctcaccgaatacatttgccagatactcatgctgaaacgcaaatgcgatctctgcttttacggatgcggcacgatggcagctgtccttctctatggcatttttcaaagtctgaaaacgtttctttgtatcatggaaatcctttatcgtttcatgcagagtctctgccgggtaatctgccagcatttcctggaattttccaaatgcaactgcactttcataaaaatcctccggtttttccgccagatcatagcttactgcatcggtaataaaaatataagctctccagcattctccgttttcatctgtcaggaatgccttcccgtcctttgtcggaatcaggttcagaacctcccgttccggatctccccccttctgaagaactttctttttcagatgcccggtgactccggcaatgttctccatcagttcttccggtttctgaaagatctcccgattgatcttctgaaggatcaccttaatggaccccatctctccgatccgatatctaagcatataggtttcgttgatatgcccgcttccgcaggggccgcaggaaaccagttctccggtaaatgcaaactgatccgctattctttttatctcttcttttggtgtacctgccattttaccttctctttcccagacagcagtaaaaagcataccgtccgaaaacaaatatactttatacttttgctgtaatttttttactttgattattttttccgctttaagatcctggtggcaagcggagcaatattttcatctgttgatccgtagagaacttcgtaatcccccgggacagaaactgtttctgtcttttctccgaagttctggataaatagatattccgtatccttattttctctggttgtcacagaaataccttccggtataaatgtaagcggcatcttcacgcctgcttcctctgctgcccttcccagaaaatcctcataaaaggctgcttccatatctgccgccacataataaacatggccctttccgtatttcttgtgagtcagtaccggatacccctgatagaaatcccttccataacgcagcagtacttccgcatcggaaacctttgcaagctcacagagatttttgcaggtatagctttctgtaattctgagatgatttcctgtttccgggatacctacgttttcttcccagtcataaagtgcatcgatctcttccgtacggataccagctgcttccatcagtccgtgaggggttccctccagatagcatttatctgtttcatctacaagtccggaccagtaggaaattaccagagtaccaccgttttttgcaaaagcgcgaagcttttcggcatatccatgataaaacatgtaggccatcggtgccgttaccaaacggtaccgggacagatcatgttccatattgatgatatctgtattatagccttttcttcggagagcacgatactgtttcagtacattttcctgataatgcatatcctcgtttcgaggtccctgcgcatccttcagcgcccagtcattttcccggtcatagagaacagccaccggagacttcgtcacgcttccagcagtttcccggatctgctccaacgcttctcctacctctgtcacttcgcggaaaatacgagtatcatccccaccgtagtgatcgatcaccgcaccatggaatttctcagaggctccctggctctgacgaagctggaaatacagaacactgtctgaaccatgagcaactgcctgcagagaggcagccagatgtattcctggttttttcagcttgttgataggcttccagttggtcgcagagggacaggattccatcagaagaaacggtgctttcttgatgcttcgcataagatcatgctgcatggctccgtccaacgctgtggtataattgtcttttttatgccagcttggataattatcccaggatgcaatatccataacatccttaaattttttatagtccagtccgttgtagtcatacatcagattggcggttgccggaagctcggaaccacctgcacggatcgcagaaatctcatgcttcataaaatccacagtcctgtctgtaacaaaacgtttccagtccaaggtaagtgcatgaagagcattttccccctttggcgaaggactttcgatctgatcaaagctgttataggtatggctccaaaacgttgtgcaccagctggaatttaaattttcgatggtcccgtatttttctttcagccattcccggaatttttcccggcacagaggacagtggcattctccgccatattcattggaaatatgccacaaaagcactgcgggatgttttccgaaacgttcagaaagcttcttattaatattgtagactttttccctgtatactggagaagtataacagtgattatgtcttccaccgaaaaatcttcttgtgcgatccggatccatacgaagaacttcttcatatttatctgccatccatttcggtcttgctccggatggtgtggaaagtatcgtataaattccttctttatacagattatcgatcacttcttccagccagtcaaagttatatcttccctcttctggctccagcactgcccaggaaaacattcccatggaaacggtattgatatgggcttttttgaaatattcgatatcttttttcagaatatccggtctgtccagccactgctcagggttgtaatcgccgccgtgcagataatggccgtatctgatctgctctgccatttttttatctccttatgatttattcgcatcaagcggacaaagtcatccgctccgctacgaagctttataccagacaactgatccacagttgatctggtataaaaagaatgctgcataatccagttaaagcatattatacaatatacctaaagatttcagcagcatcctttttgttttaaaattattttacagctccagtaataccctctgcgaactgtttctgtaatacgaagaatacgatcatggtcggaatggaacagaataatacgccgcacatcagcatgccgtaatccgttacatatcctgtgatcagattggcgatcaacatcggcatggtcatcgccttattatctgtcatgattaccttcggccacagataggaattccatgcattcataaatgtgataactgctgccgccgcataagtagatttcatagtcgggataaacatctggaaaaagatccttacctcgcttaatccgtcaatccgtgctgcctcaatgatatcgataggaaatgctctggcattctgacggaacatcatgatcataaatggtgtggaaatgatcggaaggataaaacctaccgctgtatttaagagtccggcttttgaaaacatcttaaataaaggaaccatcgttgcaacctgcggaaccatcattgcaagaagcagggtggaaaacagtctgtctttccatctgtcatgatatacctcaaagccataacctgcgatagaacagatcagaaggcagatcactgtagtaagaactgcataaaacagagagtttccaagagctctccacagcggctgctgtgcagtcaggtttttaaagttctgcataaaatatgtacccggaaggatacggcctctggatacatctgtggatgtattggttgccgcagagatcatccaatacagtggaaatacagagataaatgatacgatgatcagaaaaatatatgtagggatcaatcttctctgaattgcggatttattctttttctcagtcacgtgtatcacctactttcaaattgataaaggccaggatcgctaccatgataaatatgataaatgacattgctgccgcatatccgaagtttggcacgttgatgaagcatgtattataaacataatgggacattgtgatggttgagttcgccgggccaccttttgtcaggttgacagactcatcaaacaactgcagtgtaccattgatcgacataataaatgtcatgataattgtcggtttcagaagtggtacggtaattttccagaaggtcttccagccattggcaccatcgatctttgctgcctcgtatacagaatattcaatattctgaagacctgccagatagaacaccatgttatatcctgtccatctccagatcagtgcgatgatgatcacgatctttgcacttgtggagttacccaggaagttatagccagttgttaaaattccaagtttgatcaggatgctgttgatcagaccgtctgttgcaaacatagaacggaagatcagagaataagatacaagagatgttgcacatggaagaaatacacatgtacggaaaaagcctttaaatttcagatccttgttattcagaagctgtgcaagcaggatcgcaagaaccagcatgatcggtacctgaataataagatacaggaaagtattgacgatggactgctggaataccttatccatcatgatacgtttatagttactgaagatcggatccgcaaacctcatgtttgctccggcacctgtctgtaaagaaatgataaatgcgcggatcatcggataaaaactcataacagcgatcataatagttgccggtgccagaaagatccagccggccgctctttgtttcgctaccagagacatgccactttttttggaattcacaggaactcctcctttcaaacatctaaacctttacataagacaagggactgcatgcagtcccctgccctgtatttcattaatatttcagctttactctgtcatcttgaatgccagtgtatcctgtgcttcctgaagtgcagattctttatctgcgccgtttacaatattaacaacagctgtgttgatgcactctcttgcctcatagtggtacggagtttttgtaaattccggaatgtgtgaagagtactctacaattgttgagaagatcggctggttattgaagaactcgcttggctcattgtaaacctcagactcaccagccggcaggtagcaggaaattgcacctgtttccggaaggattgcatcatagaagtctgtgctggaaccaaatgtgcttgcaaggaagtcctcagcaagctctacattcttgcagttggatgtaatgtaccaggaagatccgccattgtttgcatagtttgtagctgtatcaacgccgtcaactttcggcattgttgtgatctgccacagacccttctgatcctctgttcccatcagtgtagctgtgatccagttaccgttaacgataccggcagcctctccgcctgtgattgtggagatgtactcatcccagttatttactaatttaacaacattgttctttacaagatccacataaagatctacgcatttctctgctacatcgttgccaacgatataagcctctccgtcatcatttacgaagtttgctccacaggactggatcatcatcatcagagtatcgccacctgttgcttcacttgtaaggagatatttacctgttttttcgtgaacgtcttttccgatctccatgaatttgctccatgtgatatctgtaagatcatcaatggtatatcctgcttcttccaggatatctgtacgatagcaggcaattgttgcaccgttatcaaacggaactccgtaatgtgtgtcatctaccatggagtaggactgtttcagttttccgaaatcatcccagttgatatccatatccttcagatctgtaaaagcatccggataactcttcagatatttctgatagctgttgtcctgcatcagaacgatgtccggaagtgtgctgtaatctccggcgtttgctgctgttgtaagtttggtctggcagtcatcagaagatgtctcaactacatcaaccttgaatccttcgtgatcctttgcatactgctcacctgcaatattcatagccttgatgttgaagttctgatcccatgcccatacagtcagggtgttatcgtcatcaccttttgcatatactgctgtagtagttgcagcaaaagacattgccatgatacctgtcattaatactgcgagtaattttttcttcatttacttttcctcctttattaagcatttcccgtttgcttatgaatagattatagcatccgtatttcctctatagtttgcagaattgttcatataatgtgcaatttcaaccattttattgattgtgcactattgtcacgctatatttttacaaaaaatatgcactttgaggattttttctttttacattcgtcaggatgtccaaaaaaaccttcttttttgacattgtgcgaacattttttgtcaaaaaagaaggtttttgtttctatttcataaaattttatattgtttttcatacatatttcacaaacatttctgcatattatgcaaaataaaccttttcaggaaactgtgttttcatcgtatgcagcatttcctctgtcagatccagaagaagttttattttacgtccatcttcccgaatgatcatggtatagtaaggcacatcatcttcataagaggtataatcgtattttttcagtttctccgttccggtattctttttatattttgccactttttcatgatagtgaggtgctgtcacttccatctcctcaagcttcagcacgtgagctgttttacgatatttttttccatagatcacatctatggtcagttgtccgttttccatagtatattcatagtctctctggctgaatatgtcataagcaaagtaaagcagcgccagaagaaatcccggaagcatgaatgcttgagagatcgtgatacccatcagtacaaaaattgccgcaaagatcaccattacttttctgagagctcctgacatatgtttcttttttctggagacctgctccacaatcctgtaatcgtacatttcttacctctttctatctgcctgatccgcatacagtctgatatttctattctgtcgtgacagatccacagatctggttttgtcgttttaccagccttcctctgaatggatgtcaaacttaagaagctgctgttcatagttctccggacgttttctccactccagaggtgtcattcccgtaacctgacgaaaattccggttaaatgtggaattggtggtaaaaccacacttatgtgctatatctgcaattggctgatctgtttttttcagataatcacaggccgcctggatacggatcgtattgatgtattccagcgggctcatcttcatataagtcgtaaatatccggcgcaaatgagtttcactgatatgacagtattctgccagttcgtcaatacgaagatcctccatataatgatcagaaatatattcctggaacctagagatcatatccatgacttttcctctgccttcgctgcaacgttcttcgcctgaatcccggtttatccttgcgatttccacaagaagcgatgccaaaactcccttagcttcttccagataaaattcctctccatcccgcatgatatccaggatcttaaggatcttacctgccatggatcggttttctttttcattcagaaaaagcgatctggagttgatccgctgaacgattttttctttttttaccgaattattaataaatttatccaggaatccttctacatcaataaaaagatactcccaacggctgatagttccgatatcactgtttgtggtatgtggataattggatgggatcaccgtaaattcccggtcatgaaactgtaccttatcctctccaagtatcataaatccctgtccttcatagcagaatccgatttccagataattatgaaaatggagataatcgatatcgttcccataattctgaacccacttctgtccaagcaatgcaaggatggggctcccctccggcatcttataatatcgaagctccattttgggttttcgtttttttgccacaaatattcctccgtatgttttctgttccgatatttactgatctttctgttatattacagccatacataaaaaaaagcaacctgcaggataacaatacttgataactcttgtttctgcagattgcaatttttatatcagctatttactttttatctgtttattcctcatccaggtaatatcttccatatgcatctgccgctttgattgctgcaaatacagtttccggtgtaacttcaaatggcatgttgtgaagtgtatcattctccgcacatgcagttgtggcaactttcataagctgctcatcagttaccttcccagctccaagctctgccagagtaacaggaagtcctacttcaatgcaccataagatgatctcttccagatcttcctggggaatattctccagtaccagctgtgtgatggttccgaatgcaactttttctccatgatacatatgatggcattcttccagtacagtaaatccgttatggatcgcatgtgcacctgcaagtcctgcactttcaaaaccaattccagaaagaagtgtattagcctcaatcactttctcaactgccggtgtgcatacgcctgcttccagagctatcttagcttttacgccctcatccatcaaggtattaaagcaaagttcagccagtgccatggcagcctctgttgtcttacctcctgcacaggaagttgctccgcttctcttgcatgcccttgcctcaaaatatgttgccagtgcatctcccataccagccacagtaagacgaaccggcgatttggtgatgatatctgtatccatcagaacaagattcggattcgccggaagaaacagatatttttcaaaaactccttcttctgtataaataacagacaaagcactgcaaggggcatctgtagatgcgatcgtcgggcagataaataccggtgttcccgcatagtatgcaactgccttcgctgtatcaaagatctttcctccaccaataccaatggtaagatcacactgctcatcttttacgatctttaccagacgatcaatctcactgttacagcattctccgttaaaataatcaaaaaccacctcacaggtactctcagcaaagctctcttcgatcgttttaccgattcttttatatccgcctttactgatcagaaccaacgctttttttccactctttgcagcataagttccaagattcttcatttctcccgcaccctgtaaatatttggacggactgattaaaattttcgccattttatacttcctttctttgttttcagaagtcagcctccgcatccggcttttgtatttatattataattgctgtatttttttattgcaaggagtatttgaggatttatgcagcatcacctgagttactgttactgttcactctgttcctagtaatatactttgtgatcacatgaaaatcagttacagccagctttccagaacatcattcagcttattcatatccagcggtttcgcgatatgtccattcatgcctgtatttttggccagctgtacatcttctgcaaaagcattggcagtcatggcaacaataggcagttttcccttttcacccggaaggctcctgattgctgcagttgcctcataaccattcatgacaggcatttggatatccataaaaacaagatcatacgaacctttcggagaagcttccactttttcaactgcaattttcccattttctgccgtttccacttttgcacctgtcatctgtaaaatttcaccagcaatttctctgttcaactcattatcctcaaccagcagaatcctttttcccgtgtagtctgattctgacagcttctccagataatttcttgctattttttcttttcttcctgaagtaaactgccgcagtgttgccgtcagccgggaacggaacagcggttttgcaataaaagcatctacacctgcagcctttgcttcttcttcaatttcgctgaattcataggatgtcagtacaatgatggggatctcttttcctatccgcttccggatctgtctggctgtttctatgccatccatctccggcatcttccagtctaaaataacagcaaagtaatcatctttcaactcatgccgtgcataacagcgctcaaccgcttccctgccagagagaacccattcacccataataccgatttcctttaatgttgcaactgtactttcacagcatgtcctatcatcatccacaaccaggaccggcagattcatcagatttctgtcctgttctttttctttttcctgaagctccagataaattgttactgtgattttagttcccttgtgcaaggtactgtccactttaatagtgccattcatcaggttcacaatatttctgctgattgccattcccagaccagttccctggactctggttgtccggtggtcatccgcgcggctgaacggctcaaacatgattttctggaattccggtgacataccgatcccattatcctcaatcgtaaattcatagcatccaagttctgaaaatccatttggcttttcctctatggaaaaaataatattcccgccatccggtgtatacttgatcgcattactcatcagattcacaaatacctgctgaatcctcaagctgtcaccacagacagcctcatgttcaatatgattgatgtgtatatcaaaattatgtttatgttcatcaagcaccggtttcgtaagtgtaataagattatctaccagctctgacagattgaaatcttcctgtgccagtgtcatttttccactttcaatgcgtgccatatccaatacttcattgatcagccccagcagatggcggcttgattctgtgatcttgccgaggcattcaatgactctgtcctggctctcaacatttgctcctgcgattgctgtcagacccacaatcgcattcattggtgtccggatatcatgggacatattggaaaggaattctgttttcgcacgatttgcattttctgcggaccggtaagcctctttcagtgcctgacgggattcaatctctgctttcttctcctgtgtcacatccatggatgccagcaataccttttccagctttccattcttccattccaagggaatataagaagcgattttataagtcttttcatccaggctgcaatactcaaacttataaatatcattttcacttttcagttttttccgaatattatccggggctatcaggatatctataacttccaatggttccagtgtcttatatttttcaagaacctgcatctgaaaatcatgataaaatcccagaggtttatatatcatctgtccattcagattgtagaattcatatctgtcattttccagatcacagacaacaaagcggtcaaccagacgcactatgctctggatcagctgctccatggaagcattatctgctgccatctgcagatgccgtgcgctctctacctttgtctctgtgatatcacgtagaaagatcatggcatattctgaatcctctatttcgccacgtatgaccacattgcggacccatcgttcttctccattcagagtgatacggcactctaaagccaattcggtttccagccccttcagcctttctgcaatataaccacggtcgtaaaaagaggataccgccttcttatctgtctccacaacataggaatccacaaaatgccggatcaattcatcccacgtatgactctgttcaaagacggtcatcagggacggttcaaccttaaaggtatcaaaagtattcgcttccagattcacataatactcgcacaaatctgctttcgtaaaagcccggtggaaagcagcagatttttgtgcctgcatgatttcttttttctccccatcaatgttaataaaaatcccggcaatcctgctggcagaaccatccagacggcgtattacttctgccgatgcccgaaaccactggtattgattatccttcattctcatacgatactctacctggtattttatctggttcgtcttatccttaattgccgcctgaagctgcaccattactctttctttatcctgtggatgcagaagatctgaccaggattccagtttattcggaaagtccagagtgtcatgataaccaagcatttttcggaattcatgactccagtttgcattcacaatctcactgttttcgtcacagtcaaaataccagaagccggagcagatagcctcattgagcagtgccagatttacatgatcccagttgacctgtacggacataacccagatctgtctgcccgcctcatctgtcgcatcctctttacaaagccgtacattattcactgtaccgtctgctgcaaggatctgtgcttcccctgttccgtgaagctgcaaaaaacggtctcgctccagtatatcttcctcgtcataaaagaagtttctcaatgagccttttgtctgttccatgaaagtatcgaatgtatatcctgtactatgcaacagcagattatccacagacaaaatagacaggttttggtcataagatcctgtcattatacctaccccgccattattttccagtgttttctgtacggcctgtgacatggcctgtgtctgccccgttacagtctcacctaaggaatatattttgtcttcataatttttcattttataaaagtcctctctccgtcttatgccttcttcatcctgcttttatctgtatacagaaaacctgtccctgctagttttgttacccatttttgcatacaaaaaggacatctgccaaaatctgccagtgtccctactatattctttaaaatcacacatctatatagtataaaaggtatcggaatctcttctgttcaaacatcttctccatatattatgatgatatggaaacagtggcaaccggctgacatggtcaaactttctgactttagtcccttctggctttgcgaccctgcctttcaacaggtttgcctttaaaataattttcattttttccaaaaataaaataccatgtggtttttcttacgtcaataatattttggtggaaaatttacatatattttaaccgaatcaagtaactcccctgtggaggttgcgaaaagcaataagcagtgggtgaggacctgcttgtatcaggaagagttcaagctcaatgtcatcaactgaatatctttatccgataatgacttactatttcatttgacatgagcgcacaaccttcattgaagtcccaaaatgaatgatttgcatatctatgtattaaaactttgctatcgcagaacttaattctactatgatgacaattaaaaattgtataatttattcctcctttccaacttttttatatattataaaataatcaccatccttatcacaagccatctcttttgaaatcgttaaattattttctcccacccatctgccatttatcatgtctcttaatactccacacagcctgccgcagtgtattactgcggccatgctgatgacacggatgggacaccttatgcttatgaaatataatacaggatcccatcaatggatattccggattatgtatataccacatatgtctggtattccgggacatgatggtcacatcccgatcatccatataaataatctcaaaataccccaaatccagacattcaagatcttccctgccaaacacctgctgcctcctttccaaaatacccttccagtgccttctccaggatctcctgcactgctccggcatccgtctgtgcaaaatacttctcatacaattccaccggcagtttcgcagacacactctgcggcttcttccgttctttacccaccagcacactctcaattccttcttttgtaatctcctttcccatcttccgcagttccaatgcctgcttcgatttcagtttctttccctcagcctctgccacctgctggatcagcttctgcatcttcacattcagataagacaaatccacagcggccaccattgccagcgtccccttatccacagcatccttaagctccggaatcagccggtccagccgcatgtatctggcaatatttcttccagtcattccttattcctcaccaagtccatcacggtttttctgtgacttgtggacatcgtgtccacaggtttcttccagagcctcgatttcctgccggatatcattccgtttcccctggctgcttatcttctcataacgtgccaccaacactgctgtcttttctgatggaagcagttccgcaaaggatctctgcaacaggtttgtctcgatcaaatatacataagcatcctcatcaaacagatccgtcttcactatcgccggtacctctgtcaatcctgctatctttgccgcattggttctgttatgccctgcaagcatctcatacccccttgcagccttcctcacaatcaccggattcagcacaccatactccctaatgctctgtaccatgtcttccaggcgatctccctcatacagctggaatagatgatcatgaaacggatggatttcctcaacaggaatagaaacaatcccattcacaggtgttggcgtattcttcaccggatcctcagcaagaagatccagtgcgtcctgaaatacttttctttttggcgcattagctttcatccccagtcacctcctctgccagattccggtatgctttacaagccttattctccggtgcgtactccagaagcggctcactataataaattgattctcccacctttactgtgtttggtatgatgctcttaaaaatccggatctgtccatcaaaagtatccgtcaactgttctgtgattaccttacagagatttgttctggcatcacacatagtcagtaagatccctgcaatctgcaggcggtcattcagtctgcttctgactttcttcactgtccggataaaatcctgcaatcccatcattgccagaagctgcggattgacagcaataatcacctcatcagccgccgtcagtgtgttaatcgtcaatgttccgagcgatggacagatgtctacaataatatagtcatacagtcctctcagtggctccagaatgccggccagcatcttctctgaacccatttccatccgcagcttactgtccactgccgaaagcatcatggatgatggaataaagtccacaccgtttctgctctgaataaattctgatggatccggcatttcctcatcttccagccgattcatcatcagatgtccaatcgtcaccggtacagccgcaggattttctactccgaagcaggttgtcagatttgcctagctgtcaaaatcaacagccagaaccctttttcccatctcagccagtgaataagccaggttccaggagttggcattcttgccaactccccctttaaatgatccgcacataataatccttgccataccctctccccctctcatgctttctttccataacagccggcactctgctccgccacatattttgcagtaattttttctttttcattctggtatctgattttcagtttcttaatctcctcatccataaatgctgtttttgcttcctgctcctgtgctttattcacatccggtgtgataatcagctgaccattttcacatttcacctgtacataatctccaagatgaaatccaagttctttcagccactttccttttaatgtaattgtcggaaccgtctcatatttataaccgctctgtccacaaaccttcatatttcttacatttttcttggccatagaattgactcctttcagatttgactaatagattttcagataaaaaaagccgctgacacgttgtcttctaacgcatcaacagcttctatcttgctttgattcaatgtattattcggttttatttaggctctttaccatctttaatacggtagtaatcatccatatccacgctgaagctgtgtttcacggacatcttcaagttgaacttttgcttcttttttctctgtttttagtttggcggatttgtcatatcctttattttttgcaactaaaatatctatttgacgctgaatctcaaccaccctatccataaattttttagagatcgtcaccggtattccaaatttcctttactactgcagtctctatgattcagagtatcatcaatgaccacaaacgcgaaaagcgtgatctcgaaaaggacaagcgtgatctcgaataccacgcaaagcgcatgaaggactttaagtaatctatcaacctgctggcggtggttctgctgccgtcagcacatctttcgacaaaaggagacaatctatgaatgaatttacagaaatcttaaatctatttattgctaacgtcatcgcatacaccttttttgtagcggtatatggcttcatcatttataacgtagggaaaatcattctctatcttatccgctatgcggtataccacatccgcctccagaagacctacaccaccgattttctgaataaaaccagagttaagaacaacggactcatgcctcagtactatgtggaagataaccacgaagccattattccgaaggaaatctacctgcaggttcaggaagaactggtccgcagacgagtggtcaagaccagcgccaatggtaagaagcgcagctacagctgcaaccactgcttctcacaaatcgtcatctgcggcgaatgcggtgaaatgttccgcaggctccactggaataaccgaggtgttaagtccatcgtctggcgctgcatcagcaggctggaatctaccggactggagtgccatgcaagaaccatcaatgagctggttctacaggatgccgtcgtcaaagcaatcaaccagatgcttggagacaaaagtagctatcaggcacaactgcagcttaatatagcctcggtcatccgagcttcacaagccacttccgttgagaacatcgacgagaagctgatggccttgcagcaagagcttatccggaaagcccagagcaaagaagcctacgacgagattgccgatgaaattttcaggctccgagaactccgccagcaaaccaccgtcgacaccgccgtaagggacgagcaaataaagcgaatcaacgacctgcaagattacatctcacagcagaccgttcacctcaccgagttcgatgagtcactggtgcgacgctaggtcaagcagataaccatctggaatgaccgcatcaccgttgaactgaaatcagacgttagcatcgatgttaacgcataactccatagacgcacgaaggctcctcaccactggataatctccggtgatgaggagccttatttatttcttttcaggtggttgccaacctttctcaaaatgcactgaattcagaaatgtattacccgttccaagtattaggtatggaattccatctctaattacaacggctccattcttctcttcttcagtcaattgaatatctattgcttttctaaccttaacatcgcaggcatatgtcttagttacatcaattcgaccttcggtttcatatatacgaaggatattctctgcatcatttactacaatagagtaatcacaatcgtataaaagcatgattgctgtaatgtgatatttttttccatcctttgtttcaccaacaatatcatcattgcagccaatcgtaatttgataacaacctgtggaaaaatccttaaaaatattaagaataaaagtaaactttctatgacaataaccattgatggaactaaagcaaagcatgatttacaacgtgtttttccggatggaacaggatcttatgatgtagttaaaaagaatgttgatgtttggaaaaatcaattttatgcatctacaaaagtaacatttgccagtgctgacttaaaatacttgaaggatagcattattgagctttggcaagagggaattccggaaatagcagcgaatgttgtctttgaagatgtatggaaagaagatgacgataaaatttttgaagagcagttgcgtgaactggcagattatattttagaaaatcatttatttgataaatatcaatgcagtttatttgatgattctataggacaaccatacacagaagatatgttgaaactaacaagttgtggagctggaaaaatgcttgcagttggcgttgatggaaaactatatccatgtatgaggtatatatttaatgaaccaatagaagatgtttcattaagtgacaaaaataaggtgggaacgatagaaaatattaaatttgaatcagtaacttttggatatcaggatgctttagttttgaaaggattgaatttaacattaaatggagctggaatgtatgccgttgttggaaaaaatggttgtggaaaaagtactttgcttaaactcctattaagattatatagacagagtgctggaaatatttttattaatggaaataacattaaaaattttaatttggcaaatttaagacagcaaattagttatattcctaaaaattctttcttattaaatgaaacagttcgttttaatataacattaggaagaaaaatagatgacaaaagtttagctgagatatgcaggaaagtagatttagtagattttatagaaagtttaccacataaatatgaggaaattattggagaaaatggatgcattttatctagtggaacaaaacaaaaatttgcaatagcgagagctatgcttcaaaatacaacattgtggctttgtgatgaaattacatcagatttagatggagatgtggagaaaaaaatagtagaaatacttcaaaaattagcaaaggacaaaattataattattataagtcataagctttccacaatagataaaagtaatatgatttttcttatgcatgatggatgtattgaagaggcaggaaccaataaagagatgataggtagaagttgtttatacagacaaatgtttgaggagtctttaaacattagctaaatattattaataatatttaaatataggtaattgcgaaactcgctaagttccttagcgatctcgaagcaaatcaggaaagaatgcttgcttttcacggattgtggaatgaaaagagaattcttacacattttaggcgcactttaataagccataggctttatggagttggtaagtcctatgcaatgagaggttttaagctgcgaatgtattcatgatgcttaatcttatgtgcaagaacaacagtaataagctgcgtgattccggaaaggatcagatcagcatgtaaagtcttctcgttttgagttcggcgtcctgcaagacaaagattatccttgatgtgattgatgtctctttcaacaactgttcggattttgtaggtgttgtcccattcttcggttccccggattgttccgggataagcgcgaagatccttttccggatagatgtagaccattcgtccacatttagatgaagtacaaggagtttcacaaaaacattggcgatgtgatttctgggttgctttatcgtaaacccatttcattttaggacaaacgaacttaaaagtaggtattccgctgcgtaagtttgatttactgccctctggcttcattaggagcaatggatcatggggacagcaggggattccgtctttattaatggtataatcctgattttcaagtccggatcttgcattcagagggatataggctttggagaaatgtttgttatcaccaaaagtgttaccagtaagaagattcttatagagttctgcggtatcaaaagctgcatcgccaaggaatgttttcggattgatcagaggatgtctggaaaagaagtccttgagtgttggaatcaagagttttgaatcgtggacacatttatcttcgtcaggggaatcggatttcttttccacaacgatgtcaggatgagaggtcataaaatctttgttataaaaagagatatgacgaatgatgccgagaccattggtaacaatgccgaacttgaagacatagcaaaaatgtccattgatatacagctgcttgatttcaggattggcagaagcatgggaaggcatggaagcgtaggcagccttataaggatcgtaggatttatcaaagcgctgtgctttcgcatatgccttaagctgccgaatgatccgattgacatatttaggattattttcggtaacaaatgcttcaattccggaagaatcgaagatggtcatatctgcttttgcggaatcaatggcctgacagatgggctcggtaatatcaacaagttgatcgaatacgagctgcagatcatctaaaaagtcctgtttgaaacgcgtgattttggaagcatccgggactttggtaaaaccgcagaattcacgaagaggttttgagtaagcgagaaaagtcaggagaagctggtctgtaggaattgagaaaatacgttggatgatcaaagcccacaggaaagcttgcaaggggtatttacgggttctgcccgttgatgcataaaaatgatttctaaaagaaatcggaataatttcatcgatgtcgatatgagtttctaatagggaaagaaatgcaggtttgtcgttttcaaatttttcttggcaatctgaaaaaatatctgccagagaaagctgtttatatggtatcataggtatcagaataactcctttcttggatggcggtttatagtttttggacgactctattataccatatccagtgaggagttatttggttttcaggaacaaaaagtgccgtatttatgcggtttatggcgtttcgcaaacgcctaaatatttaaatataaagaaaggaggataccagttatgaatagcttatacagaagtaaagttaaatatcagaatgctgttactccaagaatctggtgcccatgtaaaggatcttgcatggcgggctgtgtgggaacatgcagatggcagacaggacttggttaagtagcaacatatactgcagaagatctaatgataagaaaaaataggactgttcattagaacggctgtatgtaaaaccagtgcttccaagtgactttggaagcactattccaagtagtaattatgaagtgtgaaaggagaaaacagtatgaattatgcaagcaaattagagaataacagtagcatggttcagcctagattttgcttagcttgttatcacgcatgcagcggaagttgtagtggaagctgtaaaggttcatgtaatacaaattgtggatcattttgtattgataagtgttctggaacttcctataagaagtaaatttttataaattaaaatgaaaaaaaggaacttcaaaagagtataacttaaaataaaaaattccgtcaaatgtttaaaattataattaatattattatagttttttaaataacaaatggcggaatttttttattgagctattaataaaacttttagaacaggataaatatttaatagaatatgattcttaagaagaattacgagcaactacatgatagaaaagagccaaatttatagagacacattaaaagggacagattgctcctctgtccctaaaaatatatctctatttttctaactgctcataccaatcttctggaaaccctatatgtctcaatgatatatcattctcatattcttctacaatagcttttaattctatcaagactttgttgatccattcttttttatttggatataataattttaatacaagtatttgtgaaaacaattttctgtttggtaacatttctaattcccttggcattttgggtaatgcgggaaatgaccaataatacagccttgaataatgtgcacaacggtttcttaaatcagtgatgcaacgtaaccagctttttaaacaggccactgatgtaccatataattcttttgctaaatatttctggtcaccagactgcaaatccgcataaaagtaggacaacattcccattgaaaaaaattcaacaataacccatataggaaaatttccgccatacttttctttatggtgctgaactactgatgtacttttattttcctctatacatacatttaacagtttcacgaacttttcatgattgtgcctgtcattgtaaatagccccatccatatatcctaaagccccatgaacatgtccactgtaataggctaattgcgttcttaaatataattcaactttttctatataattaaataatacaccacgcaatctactgtcaaattcatagattctttgaattctgtgaaagtttatatttgaaaaatacgtcccatccttttttctaaacggaaggaaataagcagataatctataataattcgcctgttttaaaaatccgatacattctgtatcattatctataataaaacccttttctttaataatttcgacttgttgagcaaaggttttcggttgtttcattacctgtacagttgcttcattattttgcaacttttcatttttagtttcacttgtattcaccattatttctccaaaaataaaaatgtctccccatgggacacatcacttgcgtgagaggtgcggggagtcctgttagtgttataatatgatatttgagagaaaaaatcaaccattttttatatattgccctcaaaaattccggcaagacttttttacttcttcttcctttccatctcttcttccatcgccttctgttgctgtggctgtcctttcccttgactggctatcttcttctgatgattacggagtcgtttcagtaccgatcttcgtggagcatttttatctcttttccttggagtgttgttcatcagtccatcaatcatgttgtaattggcttcttctgccatctctgcactgcgaagatattctccattatccatgaccttctgccagtttgccaactctggtttcttcttttgtgtttctccagattgtgtctgtccggtctgggcttgtgcctgcatttcctgttgtttttgctgtgcctgctctgcctgttgctgcatgaagttctggatgttccgtctggcttcttcatcaaagccattgtaacagtcattcatgactacggcaccttcctcactgagaatcacataggcagctcttgttccatactcctcatgttccatcagaaaccatttcttttcgttcatcaggatgtaatcctgtgcaagccatgtccctttctttccttcgatttcatatccggtcgtatcaatggaaagtctggtatcggaagaacttttgattgtgagaaattccggaatgatgataaaaccatctttgttgacatagtaagctgtggtttttccatcatcggtaatgacgatcacatcgctgcaaccgatggaatggcctttgaagtttttcggtcgctgcttctgcaagcgtgttttaatgtcagccggagtttcccccggctggattcttccaatatacacctgatgatagctttctacctgaactgttcttccttcgcttttcagtttctcgtaagaacggaaacggacatcccggtactctggggtatcttttacctgatatactgcacactgacttgtactcattcttcgtcctcctcttccagttccattttatattcttccagatccataagaaaaacttcataaccttcatcactcatacagaacagttttcttatggtattgcagacaagcccgatcatatctgcatcgcctttcagaaaaggaatgatatggtcgattgcctccatcgtgtcatttcggtttcctttatcaaacattgcggttactaaacattcattcgcatcaaagttcatcgccagatccatcataattctacttctcccttcttatgtgtcttggatttctccgttgtcttattctgctcctgtgcttttgcccttgcctgaaaatcttttaaagactgcagcacagatttcttcacttcaccttttgctctgcttgcatgttctgccttttgtggctggctctgacttacagataccggttcctgctctgcccttctgtctgccgcaaccgcaaaaggtttctgtccacttcctattactgtttctgccgtatgttccgtttcctttacccttccatgcttttcatccagatacttttccatgtctgcgattgctttctgcaccagaggactttctttatagtgaggaatcatatctatcagatcacgccgtatccggtctgcactcatcaactcatattccccggaataatcttcatcaccatcttgcagatcaaatccgattcctttaatcccatgcagtctctctgctgggatactctcatatattttaatggcttcttctaaagtgaggttattatggtactctcccatgaccggaaactccatgcactctgcgacataaaaactgatcgtggcttctggctgttcctgctccggctgtttgtcaaagatagaaagtcgctctgtatcttccagacgggaaagtaaggaacgggcagttataacatcgctgtctatatcggattcctcggatacctcaagcagccagtctttgatagcttctgttttcttattcaaaatatcctccgtgagtttttccacctgttcttctctattttcaactgtatcgttatactcataggtatcaacgtcataactaaaattatccaggtccacagcgagctttttaatctcctgctggtcaagatatttttcagattcttttatatactcagccagagtgattcgctcctctgctatcgggttaatgtccacccggattcctgccatcgctatgccaaattcatttaaggcattgaaaaagctatcttctcgaatatcacctttataggaaagaaccacatcaaggtcagaatcttcccggtaaaggtcttgtctgcttctggaaccatacactcttgcagcaagcagctctacctcctgttccattcccatatcttctaatactgcctgagcatgatacagaacccctctttctacttctgccctgctcagactgtttaatgccagttcatttcttccaatctcagaagtcgcacgaagttccccctcctgcaataaatccttagagtgctggatcgtcatttcttcaaattctttataatccactttgacacattccaggtcatccattctttcacttttaaggatttcataagcagcttcctgaatagatgcgtctggattatcataatcaccaccctggatttcatgcagatcagagtcataaaaaataaacgaatatccttcttctgttgcctgtatggtcagataccctttactcctggtaaactgcattgcgattccttcataggtttgcattgcttcttccctgcgaaatccttcaaaaatacttgccgggcagttcttttctaattgtatccgctgcatctgttcttcctgaacttcttccacatctgccatcagatcttcgtaatccactacttttgcatcttccagtgagtaccctttatcttctaaaatatcactggcagcttcatctacatagattgtcggattgtcatagattcctccatcatcctcctgataatcttcattataaaatgtatagtcatagccatcttctgcggtctggattgtaaagtattgttttccaatctgatatgcaatctgtacctcattccagtccagcatgttttccattttatttaccgcttcatatatttctggattcagccaccctccgatctgttcatacgcatgggtaagccgatctattccgttttcacatcggatgaaatccatgctttcctgcattgtttccgtattctggataccaagcactttttcctgatgattgggcaaacgtaaatactcctgcatcgcttcatccagtgattcataccggtttacttttactacaccttctgcatttacatcttccatcacataaaaattatcaatgtaatggatctctggcatctttaattttattctttccggaagctgcacctcactgactgcatggaaattaaaccggacatccgttccagattcattttttccttccatcgtttcttcccaggtatctttctgtactgcctgtatttcttcgattgtaagtgtctgtccactccgcagggttacagcagaatctttcgggaattccgacaaatcatagagtgttgttccattttcctgcaaatattctgatacagcttctaacgctcctgcatcaaacccattccataaatcctccgctacaagctgtccattttctgctacgataatccctgccacatcggagccaaattcatcatgttccattaagaagaacttctcccccgcatattccttttcatcaaccgtatgccatgtcccgttatgtccttctgcttcatatcctcttgtctctgccgtgattgtcacttcgttttctcctatcgcctgttctatcctctgcatccggatctcagctcttgccatgtcgataaacccatctaaaactgccgggtggctttcgatcacataatccaggtttagatttctaccccggctgacattttccgggacttcgatatgctccgcccagtctttgttctgtctggaaaatcttccatcatgggaaagttcacggatggtatttgccataacaaaattcatacgttcttccccgaagcgttccacgacttcttttgccgcatcctgctttaagtgcagcccgtcaaaattctcccggatggcttcttcgattgctttcttacagtccaggtttaactttctggaatccagataagcatccacatcccgttctcccattgcctgttccaatgttcctttataaactggcggatatgccctgacggaattatgttccagcatgttcattctctgctggacaaactccggaagttcctgaaatccaaaagaatctacataataggctgtgatctctgcacccctgtttatcacgatcacatcacttaccgataaggaatggccacggaaatcttccggtcggtcaatgttaaagcgttcaaatatattgtctaacgtgatcgttggcatccacggtgctgcataaaccatcctgtaatcctttccgtcaatggtatagcccagactctttgcggattccattcccataaactgataagtatgctcatctccggtatccatctgataaatggcaaaccttctgctttctccatgcagaagaagtgtctcatcaatcttttctgcactctgctgtaccagtgcttcctgttttgtagcagatatttctctctctttctgcacttcccattctgtttctgtgattccaaagataccgtcatatccaaggatctcactttccgtctccacaagcatctgttctgcccgttgtggattctctggatttccgtgtaagatataaatttctgcccctccacggtacagttcatatgcccggtctttcgtaagcgggagcatatggtctaactgaattcctgcctcgtgcatttccgtaaaaccgatcatgccatccgggaaattgtcaatctgtgcctgtgtttcattcataaggcttctcgtatattcacttcccggtctgcggattgcggtcatcatacggttcaccagtccaagcacttcgtctttgtcatccatcttatatgcaaaattcacaataagatttctctgggaatctgtgaaatttcctgtatttgcagcttctgccgtttcaatcagacggtgagcatactgcatggctgtttcttctacaatctccggttctttcactgggaagtttgcccttgctgcctggattacttcatacactagctttgaaccggcttcatcgtaagattccctcatgtcccataccaggtcattcagtctttccacccgtccggggaaagtttctgcatattcatttacaaatgccttttcttcttctgaaaaaatatttcttggaaactctgctttatgcaccaacatctctgcctgctctttcggagaaaggtcagaaaaataagtaacgcctgtgtcagcatcatattccacatcataaaaatcaatcggataattctctccgtgtccactgctgtcatagagtggtgtgacggcagcacctttttcctccagaaaactttccagtggtttctcattctcctctatctcaccactttccagaaggcggacgtattcccccacattctgctctaactgttccctgctcatgttttcgatcaggtcataagtaaactcggaacccatgctgcctgaaagatgcaggatcaaatcttccttatggaaggtatcccgcaccggtctttccatttccagttcgtgcatctgtgtctcgatattctcaatgacttctgcagacgttttccggatggtatccatagatgcccggagtgctttcatatccttgctctcacaccagctggcaatataggtaaaagagtattctgaagtatccaaaccaaagtgattgcagacaatataggcaatactttctgcttctacttcttttgttgtccggtcttttaaaattccttccgcatccattacctcccggtcatgcagcaatgcatggcttacttcgtgtactccggttttcatggtctgaagattactcatatcttcctgaattgcaatatacttttctgtctgatgataatagccttttgcttccccttctatttccatcatgcggattggcacaggagaaatgttctgcaatgcttccataaatgtgtcataaaactgtacactcccggtaagttccgatacttccagctctgcaatcggctctccctctgtctggctgacatcaaataccgttgtcacacggaaccttggaatgaccatctccacgatctctgtttccggctgaccgtcatccccgatcaccggctcttttgttacagggtcaatcttttcaatctcctgtttctcacggatgggtgccggtgcgatgatctggattcctttttcccctctctttacatggcggttaaacttcttctgccacgcctgataccctgccaccagagtagcctccggtttctgcatggtgatcagaagggtgttattaaaactgtaattatggaacttggacatggtattcaaatattccgtataccgttccgaagtaaaaatctcctttacgccctgttccagccgttccgatatttcctttaactgtttctctatattatttgccataaacaaaccctccattttatgtccccgccagagaaaactctgacgggaaatcttttataactcctgttcgtgttttttctttgcagttttctgtacaggtggctgttccgctgtattctgctgtgccttctcctgctttaagcgttccagaatagatggcttatggattctgtctgctgtttccggaagttctttttcttctacagcacccctgctatctgtgctacttccttctctgccaatatcctcatctgccataatcgtctcattgcccttttcatccatgttcagcaacgcatttaactcggataaccgttccatcttttcattcagctctgcttctttcgggaatggtttctttacctcttcctgtgcagtcgcaagctgctgttgtacggtttccaatttctgctcactttccgtcagcttcctgtcaatggaagaaagggtgttatggatacgctgcatatttcctaccgggtcttttccgatctccagcttataagaacatttccctttgaccgtcagttcaaatgcattggagaatatattgtaggaagcagataacgtaaacccatgatattccccgacctttccaccggtgctaacggtttttagtcctgcacaggcagcgatcaatgcctcgcctgcttctttcttatcttcataaaggacatttcctactgtcatggcaaatgtgtcattatcctgtaaatccacgctttttactacctgcgaatccacctgcatcccggcaatccgttctttcaatgcactgatctgtaccgggaaattctttgcaatatcggattccaaacggtaaatctgactggtatggtttgcctttaagagtttcagcttacttacctgcacatccagatccattttttccttaatgtacggatttcctgtagcaagtgccttgatctctgcataggacagtgccgtatcatccacatcttcacaagccctgaccggggatttactggtcatgatctgactgatgaacttctgcttattctccaaaatctgccacatatacgcatcaaaagtgttctccgtcacataccggaatatctttactttgtcattctggtttccctgtcttaaaatacgtccttcctgctgttccagatcagacggcttccacggacagtcaaggtgatgcagagcaatgagcctgtcttgcacgttggtaccagcaccgagtttcggtgtagaacccatgaggattctcacctgtccggcccgcacctttgcaaacagttccgctttctttgcctccgtgttatattcatggataaaagcaatctcttctttcgggattcctctggcaaccagtttgttccggacatcatcatatacgttgaaagtcccatccccttttggagtagacaagtcacaaaagatcagctgggttgtccggtctgtctttccctcattccatacctggaaagcattttccacacaggtattgaccttgcttttttcggcatccgggagaagttcattcaacagtctctggtcaagggcacattttcttccatcattcgtgattttcagcatgttgtcctcggtcggatttactaagcctgcccttacactttcggcacgttctgaaaatgcactgaccatttcctgctgttcttcacttggcttcaagacttcattgataaactctgcttccggcactggaaggttcagcatatcagaagtctgaatatctgcagcttccttaaaaatggagatcagctccggaagattaaaaaaacgggcaaaccgtgtttttgcacgatagcccgttccttccggtgataattcgattgcggttactgtctctccaaaggttgccgcccaggaatcaaaatgtcccatacccatacgcatgagtgtgtcatactggagataacgcatgatagtgtaaagctccgtcatactgttcgatacgggagtacctgtagcaaaggtgatccctctgccgccggtcagttcatccatgtaccggcatttcataaacatatccgaacttttctgtgcatccgtctgtgagattcccgccacattccgcatttttgtatacaaaaaaaggttcttaaaactatggctctcatccacaaacagccggtctacgcctaactgctcaaaagttactacatcatcctttctggtctggtcattaagtttcttcatcctcgcctgcagactcttctttgttttttccaactgcttgatagtataattctgccctgcctgatgtgctgcttcttcaatggagaacgtaatatctgcaatctgctgttccagcatggcaatctgacgttcccttgaaagagggattttctcaaactgtgtatgcccgatgatcacagcatcgtaatcccctgtcgcaatacgggaacagaaacgttttcggttcgccggctcaaagtctttcttcgttgccaccaggatatttgccccaggataaagtcgtaagaaatcactgccccactgctcggtcagatggtttggcacaacataaagattcttctgtgagagtcccagccgttttgattccataccggctgcgatcatctggaatgtctttccagctcctacgcaatgagccagtaacgtattatttccatacagcacatgagccactgcgtttttctgatgcggcatcagggtgatctccggattcatgccaacaaactgaatatggcttccatcatattcccgtggacggatgctgttaaatcgttcattatagatcttacagagatcttcccgtcggtgcaggtctttaaatatccactccttaaattcctctttgatcagttcctgcttctgctgtgccagcatcgtttccttccggtttaattcccggtgttctccatcggcatcctgtaccgtgtcataaatcttggtatcccggaggtttaaggcatcttccaaaaggcggtaggcattggctctctgtgttccataagtggaagtgacaagagcatttccgtagctgtccacattctttcccataacattccactgtccggtcacttcggcatactggactttgaccttgctccctacataatatcttggtgtatggaatgtctctgccatgaactgtgtgatatagttctctgaaatccaggttgctccaagtcttgcctcaatctctgatgcatccagatcttttggctgtacctgctccaaatactgcacgttcacctgatattccgggtgatcttctgcaaactgtttggcgatctgcagtttctccctcacatttccagaaagatattcgtccgatggctcccatttttcactgatcgggttcttaaagattatccctgccagttcttcggtaagctcctcttctgttttcccggaaagctgtgccatataggaaaggtcaacgcctgccctctcaccgatagaaaccgcaaatgcttcactggcagtatctacagaagttaccgtttctgccctgcggattgtccttttggtaaaaatatccgctttccgtttcagttctcccttatcatccagaaattccagagaagtcaaaagacaatagctgctgtcctggctaaatgcccgcttattggcattactgctaagcagaccatattttgctgtaaaggtatcgtattcttcattgagttttccctgcagctttgtgatctgttcatcgcttccctcttccatctggcactggatcagttcattcgtaacatcacggatcttcaccatccctttgacacgttccgctgtcattgccggaaggtccatccaattcatcacagaattttcccggtaatagacttcatcattcactacggtataactgaaattctttacttctgggtctgctggaatggacaccacatcttcttccagttcggtgtcggaaagttccagttccgtaatggtaccatgtatatgctttacagcttcctttaactgctcctctaaggtgattccctcttttggtcttacggttacttcctgctttccatactgggtactctccgttgtaaactctccaagcaccatttccggatgatctgcaaaatacgcattgaccgaatatccttcggcagtttccttcagatgtatccagtccggttcctcgatggaagccctgtctcttttctggaaaaataaaatatcggaaacaacacctgtattggcatttctctggaacgcattatttggaaggcggatcgcccctaataactctgcccggtttgcaaaatactgtctgactgccggattttgtttatccatcgtcccactggaagtcaccacggctaccacaccaccgggacgaaccaaatcaagggattttgcgataaaataatcatggatcagaaaatggtggcggtcatatctgcggtcactgacctgatatgctccaaatggtacattcccgatcacgcagtcaaaaaagctgtccgggtaatctgtttcctcaaatccctgtatggcaatcttatttttctggtaaagctgccttgcaatcctgccggaaaccgggtcaagctccacaccatacatctttgccttgttcatactctccgggatcagtcccataaagttaccaacaccacaggacggttccagaatatttccctgtttcagtcctatattttccagtgcttcatacatgcttcggatcacggtcggtgatgtataaaaagcatttaaggtcgatgctcttgctgcactgtattcttccggtgataaggtattctttaactccagatactcatttgtccaactactgttattctcttcaaatgcctgcgggatgccaccccagccaacataacgggataaaatttcctgttcttcgggtgttgccagatgttcttcctgctccagagtctgcaataaatggatggcttccatatttgctttatactttgctttcggaccacctgctccaaggtcattatcctgaatccgaaagttatgcggttctgttacaatctcttctacttccggttttaaatatggttgaaattctccctcatatccaaacatttcatcttctccgggaatataattgcgtccggtttccagacaccgaaacacatcggcagttggtgcattgctgactgcataaaaatcatcataagaatactttgggaaatcttctgtatggtaggtcgataaatgcagttctgtattggaacgggtctgtgcaaccagatcttttccttctattccttccggcaacattccaatcgcttcaaaatgatacccctgatactcaaaaacaccttcgtcccaggaatctgcaatctgttctgcagtctttctatctttctcgctttgtggctgctccacttcggtctgttctgatacttctacaatatcttcgtctgtcagagtctcatcctgttctttactttctgaaacagtttcgtctgtttcttctacatccgacatatctatctctgtcggttcagacaatgcccttgtatccagataatcaaacatcgacatctgatgtccggacaatcctacttccgtaaaagatgcttctgcttccgatgtcgggaaaatcgtataggttccttctgcatattggtgaagttctgaaagaagttctgttttctgctggtagtttgtcccatatgcctcaaaatctaatggcagaactgccaatgctgcatccatcttctgtaacagttcttctgcctgctctggattctctaaaactgccaccatttcttttcctggtttttcccagaagaaatcatccgtaaatggtctgtctatctcttccggaagacggtcataaaagcggagtaccttgtttgccatctgttcccgttcatattccggcatacgagcataatcttctgcctgcaggaactggtcattctttatcagataagctactctatttgcaactttattccaggataataaaactgacgtatatggatttccataagcacctcttgcaagaaacaatccttttccatcataatttgcgtgtgaatcatcggcaccagacagtgcatgactgcttccaccgattccatactgttccttgataaaacctgtcctcgatctttcatcctcatgcagcagataaaaggaatacgtcctaagcctgccctgcgaatacgctccacctcctgcaagaaaaacatcaatctcatcctgcgtaatgaacatcggatggtctttccatgcaaacccgtctcttgcctgataagggatgacctcatccgcaaacttctgaaactgctttgagatatttataggatcataatgatggaaacgcataatggaatgattttcttcataggcttctgccagtgcatccagtctttcattcagttccgaaagccactgtggatcttccagcttttcttccagataatccgtgatctccggatagatactgtgaagatgtggtaaatcctcctcatcaaaaacaatctcggctaccccttctgccatatcccctttcatataggcaagagcctgtgcatgttcttttactgcattgtttcttgctgcatccaatacagactgcggtgcatattcaccctggtctaaaagctgatggatacgtccgctgacatcttcccatgataaaaatgccttatctaaaatctggtctgtgaccgtatgccccactgcgatctgcatcccggtttcatcaaaccagaccgaatattcacttccatcaatctgaaagccttttccacctttgcggtattcacgcttcacaaactccgtatattcctccggggcctgttcgctcataaaattatagatgatacgaagttgactgcccgcccggtttcctcctgtccgtaaaatctcatcgacaacgctttctggaatcgggatttctccggcataaagggctgctgccctttcctcgatctgccgtctttgttcatttgcagttggatattcaggcaaagataaagcagaggcaatttcttcctctgctttactcagtccatcttctcttgtatcttcaactagctgtataccaattccgtcaagatgctctcttccgctgttgccatcagtgcgttcatatgtgctgtccaggccatcgggtctgcttccttgtccggtgccggatggttcttcagcagtttctccatctggctgtccatcctctcctgtgctgccttctcgatctctgccagatggctgttcagctttcctgtcaggaacaggctctgatacaggctgttcttgtgttccttcaggaatgtcctccgaagcatcccgtatttccctattgtcacttcttcctcctctacggtcaggttcggaaacaggtaatcccccttgcgatgatatgtcagttccatagtcggttcctccttcattctcgatattttcttctttgttgttttctacgcccttatttttattttcacgcattaacgtgttaaagttattataattcctttcattggaaatttcaacctcttttctggcttcttccagagaaattttatgtaccgtccttccaatgtcaatcagaacactctcactgatctggcttgctgcatttccaagaaaggtcagtacagacagccggttataatctgtgatatgcatgaagtcctcttcttccagaagttccatcggttcaagcccgcatcgtctggaaagcatgtaatatacactgtccgttgcaagctggcggaaatcactgcggatcgtaacttcatccagatcttccagatacgttccttccgctgcatattccaagccgtccagatattcttccagactgtctgcgaccatttcccttgcaaccgccatcaacgcatccgataaagtccctgtatctttttcttccagaccatacgcttctgctaaatggttaaggatctcttcctgctgatgttcctgcatctgccacaggtaagggcttcttccgcctgccaccatgtgcgtatctgaaatatcaaacacataccggagtctggtattatgaccattctcgtcaagcagggcgattcccctagctccccggtttacccagcggaacatcttctcattccacagttccagggacgcacaggcggttgcctgtggatgctgtgcgtggatcagtaactggtctgtaaaaggataccggtatagtctcgctgcggtatccatataacccatccagtcccttggcgaactgctcaccaatgtcgcatgttcctgtgccagttcccggatgtcctgtaatttcgacatactgcctacctccttgtcttatttctttttcttctttggaaattccagatggaaccttggctttccgtcctccagtgtcagtaaaagatctgcgtcaaactttatatctttttttctggaatacagcccttttacatgagtacaggctttatcaagaagctccactgccatctttttatccagtgttttctccatgcttcctaagaaacggttttctttccagagggcaaaatcacactgccggttggaacagtaaaaattctgttttccttcgtagacatccgaaccgcagaccggacacttaccgatcacttcccttgctttctggaaccttctcctttccacttccggtatctccctgcacacagaaagaatcttaccgactaaggaagtgatctctcccataaactgtgtatctgtgatctgccctttttccatcattaaaagctgattctcccattcggcagtcattgcggcagatttcagataagccggcatgacattcaccagttccctgccctctgtgcttggcaagatctgctttccttttctgactgcatagccggaagaaaccagtttttcaatgatgccagccctggttgccggagtccccaatcctttcttctctgtctccgaatcaaagtctttattccctgcggtttccatagcagcaaggagggtatcttcattgaatggttttggcggggaagtaaaatgcactgtcttttctgcctttaccggagaaagcgtcattccttcttcatagccatatggaatggaagtttctttttccgtttcttcttccggcttggctttcacgcactggttcttaaaagcatttcccgcctctttaaatcccatctgcaccggcacttttcctctggcggtaaaatcatgttcctgacatttgaccgtaatatccgtctgctcatactgatactcttccccggttgcctgcaccagctgctggcagaccagcatcatcaggttctttttgtccgctggaagatcagagattcctttttctacggcttctttggttggaagaatcgcatgatggtcggatacttttgcattgttgatcactctggtgatattatgtcccagctgtccataatccaggaacggaagtaagactggcattttccctaccagttcctctacggtatccctcatatcctccgtcacgaactggctgtccgttcttggataagtgaccagcttttcttcatataattcctgcagcatatccagtgttttctttgccgtatagccaaagtaacggtttgcttccctttgcagactggtcagatcataaagtttgggaggaaacgctttcttttgttccttctttacctgtgtaatcactgcttccgaatccatacataaggaagcaagaagatcggctgcttcctcatttgcaatattttcagaaactaccgtaagccttccgtctgtcagtgctactttataaaaggcttctttctgaaaatgctcaatcttatcctgacgttccgcaagcatggcaagcgttggcgtctgcaccctgcccacaaccagacgtttaaaataacaggtcgtatatgccctagttccgttcattccgatcagccagtctgcctgtgccctgcataccgcagccatgcagatattccggtattcctctgctcctttcattgtctgaaaacctgtccggattgccgtatcttccatggaactgatccataaacgcttcaccggtttcctgcatccggcaaggtcatacactctctggaagatcagttccccttcccttcctgcatcacagccatttaccagatagtccacatctgcccggttcatcaggctttttaacacatcaaactgtttcttcttatctctggaaactttcaacttccagacctgcgggagaatcggaaggttatcaaactgccatttctcatatttcgggtcatattcctccggctgtgcatactctgacagatgcccaaggcaccagctgacaatacagctctccccttctaaatatccgtcctcttttttataagctgacagatttttggcataactctgtgccacacttggtttctctgcgatcactaaaaattttgacatacgctttttttgtcctttctgaaaaaagggcagccaaactgctctggctgcccctgtccttattttggttgcttctttggagatggaagtttattcttcttcctcatcctcttcttcatttacatacggtccgtcagagaactccagctgttcgcttacatagtcctcctctttgccacgtccatgctttttataaacagcgatacctgccactccaagaatcactgcaagtacgattgctccaagtccttttacattcattcctgtcttttcttctttcttcacttcggtttcctcctctactgccggggtagtttccggtgtggtttccggaatcactacggttgattcttcggtttctttgctcttttctgtctcatccagaaattctgccaggtcattctcatcgaccagggacatcatgtacacgttttctgtattgctggaacggtcaatgaccatgtaaaacgtatttcccttcttggtctggatggtaaggaactgtttcgtatcatcattttccttatcatccaccagctgggcatttcccggagtagaaaaagcagaattatccccttccccggtgacccttccgatatcctctttcttctccgtatcttctgttgattctgttgttgtttcttctactacctgtgtcgttgtctcctccgccggtgggtttgcatttgcgtaaaccgtagcaatggatgtcccggagattatggtggctgccatggcaatcataagcagtttctttaccactttattcctcatcgtctaaaacctctctttctgtcatctgaccaacagatggtctatgaacttctgcgttgttttcctttttctgcggagcttttgcatcctccaccgtaataccgccatcctcatccatctggatcgtaacggttcctttctgaatcccgtcaagcaggacaagcaggctgcggctgtccagcttcatggaacggaacgacttaacgatctctatatcttccatctgctgtctcaatgtattctgccgcttcaggtgttcctgtaattcagcaatcttatcctccgttttctgaatatcatccagaagtttttttaatttcatgttcatctgccctgtcacctcctctaatgcagacgaccaaacgccataaaatgttcctgccagtaggcacttgcgatgctcgtatactggacaggcttgccacagtggatcatcatgttattgccgacatagattcccacatggcttgctcccgctgtgtcataggttccctggaagaagatcagatctcccggttttgcctccgatggcgatacctgcgaacagtgtgaccgcagctcatcggcagtacatcttccgacattccatccatttccacagttattgataacccagcttacaaagccggaacagtcaaaaccacttggggaataaccgccccatacatatggaacacccagatatttttctgcttcctgtatcatttttgcaaactgtggatcagataaagcatctgccggtatgtcgtaaccaaatccactgcttccggtgggtatgctgtttagatcaaacagataatcacggttgccataatatttgttatacgcatcgtagcgttcctgttcttcctctgtcatacggctccttaacacggcatccaggctgtggtttgtcatcgttacatccaggcggttcacttcttttgtggtcgtgacctgcacttcctggcttccattactgtctgctatgtaggcttcccatgtctggtgtccatgtgcggatgccgccgcatgattgtcatagtaaacatcgaactgtaccccatatcttgcaaacgctccagtatcttctactacatattccacaccgttcatgactacatgtgttccgatcggcacaaatgggttcgctgcatccacggcaatcgtatggtttgctgtcggcatcgccccactggctgtcggtccgccactccactgcccacagcagatcgggcagttacagtatccactcgtcacaacctgtcccaaggattcccctacccggaccgtcttggtttccgtaaccgtctctctggtagagtctgtggtgatcccatactgctgtcggaagatttccttaatctcctctgccacttcctcgtaagtgaagccgccatattttaccgtaagataagagatcagctgatatgggttatgaccgatctcatcaatctgataccggtattcatcgtaatccggatgggtggattccatctggttgatctgtgtattcagtgcttcttccaaggcacggtacgcattttcagcggcataaatatcttcatccgtactggaatagctagtagagatgatcgctgaggaagctccctgcaaggatgccgtacagctggtaaaactggctgcgatcagcacaaagatcagggcaaagactgctaccgtggcaaaaattccccggttctgtgccatcaccatcttgaccgcatctttcgctttttccgtaaacttctgtgcggaagtgatcgctgcatcctttacttttttactctgtctggctgcctgatactgcttctggtaacgcttcttctgaaagagtttctgcagggcagatttctttttcttctctgcttctcttttcactgcgtccttcgcttcatttccataggcagtctcaaataccagccagctcctttctgcttcatccaggacgctttcttttaatctccgggattcttccctccgccctttcagctgttcccgcatgtagatggatttccttgcaaggctttccccggcaagttctgcccggtgtgccccttccactgccgcattttcatcctcttcttcatgcgttttccagtgtgctaccgtgactgccgcatctttgactgccgatgccggattccggataccgatcccggcaccatgtaccatgccgttaccttcatcaccaaaagacaaacgggaaacttttttccgctgttccttcagcacccattcccttttggacttgcctttgatctcctcctggaactcatccagggaatcttccatcacttcggaagtttcccggtaacgggcagattctcttttggctgctttttcttctctggaagcctccttttccttccttctttcctttgcagcataatccctgaccatctttttcttccgaagatcccggctgtccgcaactgtctccagatatgcccgttcccctcttggctgtccacggatactctctgtgcgaaaggcagatttgggattttctccattttcaacggaaacatctccctctgttttcacctcttcatccatatctggttttatatcctggtcggatacatgttccctgctatatctgggttttctggaactctgctccggctgttccatcccccgttcttctttccgccgttcctgtctgcgtttactgaaatccagttcctctttcttctcactgcggggaatctcggtatccgtatcccgtccggtgatccttttttcttccttgttccggaggttttcttcccgcagaccatcccggctcatcttctggacggttttatctctcgccttatactcatgctcctgcaactttgaccatcccctttactgctttgtcccggttattctgtcttatcctgatagtcctcccatttctccaacacttcatctgccatccctgcaatggaatccgtcagcttgtctgtcattcgctcacttaaagttccccttacagccagacaagctgtaattcccatgaagtcaatcagttccgccagatagataagatcatccatcatttcatcagccgttactttttcctttgtgtccttttccattttcaaaatctccttttcattgtctgcacagattctttctgcaaatatgcagcaaggttcaccgctgcatctctccatgtttctgtaatcttccatcttgtaatcctccattttccgggcagaaaaattaccggaagtattccccccggctcatcctctactctgttttattttgtttcgtttatttctttaatcgtcccgttctccgataccaagtttcttccgtttctccacctcgtccggcttggaagtcatcagggcatacaacatcagggaattatcaaacttatccttgaacgggataatggtgctgccataaaagaccagtccctcaccttccccgctgttcgttacataagaaagctggtgtggggaaatgttgagctgttttgcaaggatctgtctgtcaccggatgcctggttgagcatcaggataaagtcagagttttcaaagatgttctcaatctcccggctggctaacaggtcttttacgttctgcgtgatacccgtagggataccaccccatttacggaatcgcttccagatctccacgctgtatgctgctgtctgctcctcttttaagagcagatggaactcatcaatataatatctggtactcttattcgcagaacggttgatcgttaccctgttccacacctggtcctgcacgatcagcatacccagttttttcagctgttttcccagatccttaatgtcaaaacatacgatacggttactcagttccacgttggttctatggttaaacacttttaaggaaccattgacgtagatctcaagtgccgttgccagacgctgtgcttcctgctctttctgattacggagaagattatataaatcctctaagatcggcattttttccggtaccgggtcagaaaggaaatcctgatagaccagccttacgcatcggtcaatgacggtcttttcaaccggctccagtccgttctttccgccaactaccagctcacaaagggacaggatgaagtccgattttaaggaaagcgggtcatcatcgtcagcgtaatccaggttaatatccatcggattgatataatcgtggctggtcggggaaatacggatcacctgtccatgaaatgcccggactaacggataatactccccttccgggtcacatacgataatgtcatctttcgtcacgataaatgcgtttgcaatctctcgttttgccgcaaacgatttaccggaacccggtgtaccaagaatcagtccgttcgggttcttcagcttcttcctgtctgccatgataagattattggacagggcatttaatccataataaatggactccccactcataaataattcctgtgtggtaaacgggacaaaaatcgccgtggatgtcgttgtcagtgcccgcttgatcggtacgaaattcatcgcaagcggcagacaactcatcagtcccggctcctgctggtaatccagccgtttcaatgcacagttatatttctgtgcaatacctgcagtctggaacaccacattttccagttcctgtttggtcggtgcggtatttaagaacaatgctgtcacaaggaacattcgctcatttctggactgcagatcttccagaagcctttttgcctccccaccgtatgtatttaaatccgaagggataatgtccatgtcatagcctgcccggactgcttttttctgttcctcgatcttcatacggttaatatccgtcaccttgctttttaccagtttgatcgccttcatctggtcgatggactggatatggaaattcaccatcaggttgctgtccatctccagaaactctgccagcatcttgtcggtaagttccggtgcaaggatctgtaaataggaaacagttcccatcgtgccgcccatctcaaaatcttttccattcttaaatacaaaactggtcggtgcgacataatccttggtactaagccctgtccgaagtacatcgtcataagagaaatggaacggaactttgctgtcctggttaaaggtttcatacatgatctgtaaccgttcctctccgttcagcggataggcagataccccaaggatcttaaagttattcagaatatccgactcgatacgttccagttttggccgtgcttcccggatattctccgcttcaatcccaaatgtgatatatttggtacgcatcagcccgttatttccttttgccagctggttattgagcatctgggcaaactccatacgtaggtcatcaaattcatcctcctgcggattgatatggatgaccttctcatactctgccatgttgctgtgctggttgataaaagacagctgaaaatgaattgtgctgtcaaagtaattcaggaaatcacaccagttttcaaagatggcgttcttatcttcattctgtgccagctgatagttgatgtcataaaaacggatcgtcttggaataaaacttgtcctgcacccggcagataccgtcccttcccatctcatggtatggaatcgactgctgtgcagtgatcctcttatctctggcactatccggtgttttctttcctgtcccactgcctttcgttccggaaaccacttttcctgccggacgctgccccgacggtgctgcgacagatctgctctttttcttttttgcgtttttctttgcgtcacgcactgcctgcttttctgctctggctgccagctttgcttccctttttgcatttttcttatccgctttttcatgttccttatgcagtttttcttcatatttctgtgcccttttgagggctttcttttccctgcgtgtcagtttccggttcggtctgcggacacctcttcgccgttccagtgcttcataccctgtcaccataggctcatcatgcaatctgccgcttactggttttcttttcattgcggggtctggaagttcttcttctccatcctcctcatccagccagtaatcatccggatataattcgtctaagctctgtggcggctgtctatcgttttttctttttaacacccttcgttccccctttcttctttttgaccacggtatactttttctcgtacatattttccatctggtacttgcgtaccggaggacggataaattttacggtgatcatattttttaagaccttttctaacgggagtccatccttctcatacatggcaaacaaaaatgccggaagcatcagaaggcacatcccggtcgctgcgttactggaaccaatgattcccctgcttaagaaataaaacggaagccctaccgccgccgcaatcccaaagcagatcagctgccgtttcgtcaggttgaaaatgatcttattcttgaccttggttaagtctttaggcacagatacaaatgccattgccagttcctcctttcttaatgggcgttaaagatactgcgggcgaagtttcctgttttcatcagactgaaacacaggatcaccgtgtatgccatcacgccgaacaatgcagaatgtatgttatctgacatctggatgtttgcgaccaggaccgcatagattcccacgcagaccatcataaaaaatccctggaatgccagtgcaaacaatccacgaagatagttgttcccgatctgcccccattcccggttggacatggttgcgaacgggatcgctccaacggacgaatagagataaatctcaatcatacgtccatacaaaatcactgtaataaagactgagataatcttcatacacaggcttacaagcatcgtttccagtgccagtatgacaagttcaccgatctccatagattccatcgccgtctccatcgtggagatcatcgtatctatattgatcgttgtatcagaactgataaccccagctgcccggctgactacggactgcccgacatcaaataccgccatcgtgatcgtaaaggtatggctgacgatccagactgccacccacatcttgaaaaagtatttaaagaacatccaggtgtcgatgtcgtgcatgttgttcttttccgtcaacatggagatcagctcataacaaagtacaaatgtgataatcataccggcaatcggtacaatgaccgactcggaaagattctgtatcatgctgtaaatgctgccattccagccctgcggtgtctgcccaacctgagcagcaatctgaccggtcttttcattgacatcggtatacattgttgtcaggttggaacttaccatgcctgtcagaagattcctcatccattcttcaatcgcttcaaatatccgatccatgagtcatctccctcctgcttctctcagctgaacaatccggacagtaacggtaccagctgggtgccgatcagaacgacaccgcctcctgccatcagctgttttatgtcttttatgagaaaatattggctcgaaatgagccttgaaaagattaaaatagattaaattttgatagatttttcttatttatgggagccggaacctctttcgatggttccaagctccggtattgattttaaattgaaatgaatttccattgtaaccgtttcaggagtacggcggtaattttctgttccgtctttctcctgcggttctgagataatgattttactgatcagccggttcagaagattggcatccagttctttgatatccgcatactcgctgatatcgtcaatccactgttgggactgtgcgtccagtttttcttctgtgttcagcacactctcattctgggaaagttcctttttgatgtccgactgctctttctgcgtcttctccaacatcttatcaaaaacagattctgtaatcttgtcattgatgaggtcgtcatacagttttgcaatcagccggtctaacgtctccagacggtctttctgctttgataccagcttctccagactgtctctgtgtccctgcgtatcttcctcacacaactcttttaccctgtcttccagttctgttccatctccggtgactgcttttgcacattcctggattctggtaaggactgcatcatacagatcatcagcgtccactcggtgctgagtgcagtgtgctttccccttatggatataagtggaacaggtataaacttcatgttggtctttggtgtgtgtcttctttaatgttaatgcaccgccacactctgcacagcggagtaaaccggcaaacatactgtattctccctgttctgtctggcgtttcctgcctttcatcttcgcctgtaccagagcaaatacatcctgtggaatgattgcttcgtgggtatccctgactgtgatccagtcctccggagctttatctccctgattgccaatcttaaaacggtagtacctcttctgggaagccatgtcaccacagtaaacgggattcatcagcagggatttcagataggattcatcccatacatatttcccattttcagggtctttcttttcccattttgtgtaataggtacggagtccccgtttccggtgccaccatgacgggcagggaatctgctggcgttccagttctctggatatgaagttaatcccatgaccatccaccgcccactgaaagattttccggacaatcggtgctgtctcatcgtcaatcaggagatgtcccttttcctccgggtctttctgatatcccagtggtggaacaacgcctgtaaacttgcccttggttgcctgcaggtgataggacgcatggactttcttggaaatgtctctggaatacatctcattcagtacattcttaaacggagcaatctcattgtccccgtcaaaggtatccacattgtcgtataatgcgatataccttactccatgcttcggaaaaaactcttccatcagaaatcctgtctgtacatggtttcgtcccagtcggctctgatctttggtgattacaagattcaccagtcctttttcacaggctttgagaagtctctgtaagtccggtcggtctgtgttcaatcctgtataaccatcgtcttgaaacacatccaccacctgccagccctgtgactgacagtaattcaccagaatgtccctttggttggagatgctggcgctctctccggtcagttcgtcatctttggaaagtcggcaatatacgccaactctccatgttgcatttctgtctgtattgttactcatatatctgttgttcatctgatacctccgttacgttgcacatcctacgcagatttcagattactgaactcataatcattatactgcttatctttcattattgcaagtttatcttttgttttcgtgtcacgtattttctgtgcgatcacttcggcaaatacttcttttgcgtcctgatcaccgtcaaaatatactttgatattgatgattttcttcatcgctgccattgtaaaacctccattttgggtaaaaaaaagcaggtaatccatttttacagattaactgcccagactgttgattgcctttttgaattttcgtatggatacctactgttttcgttcgattgccttgcacgggcagacggcaggcggcaggtagggtatctataaagcctgccgtccactccaaaatcctgccgtcacccattctcttttatttttttaatcgaatggtattttcctgtttttcattcatctgataatccagttcttctttcattcggcttctggcttcacgcatggttctctgggagattccctgtgattttgccttttcatccaattcccgaattgtgactgcatttccgtccgcaagcagttcatagatcagtttcgttcctcgttgcagctttgtttctgtcggctttccttcctttccatccagaagatcatcggaagaaatctcataagctcccacccatcggaaaccttcttcatctccaagtttaaatgccatcgtctcacccggaggtgcaagagaacttttctcatgaatcagcactcttgttgtcgggtctttctttacttttccgatgaaaagcaggcttctcactgccgccatgatatcaatagagccaagtccccggtaagtactctgcgtacccgaagatttattcagatgtccaatcaacacaatcgcacagccggtcttttcagcaatcattcccagttttcgaaataccggacggacttcatttgcccggttcatatccacgtcggcaccgataaatgcctgtaccggatcaatgattaaaagtctgacctgattctgacggattgccttttcgatacggtcatcggataatgtcagtgcttcttctgtatcatcaatgaccataacccggctcagatcagcaccggcttctaccagtctcggcttgattgtgtctcccataccgtcttctgcagtctggtatattacattgaatggttcaatctcttccatattcgggaaagtcttccggttcgtacaggctgcggtcagcatcatggcaaaataagtttttccctctcccggattgccctggatcattgtcagctttccaaatggcagatagggaaaccacagccattctacactggtctgctcaatatcttcatagcacagcatcggcactagttcttccggtgctttcattgtaactgtttcaatgattgctttcttcctgtccgcacttttatcgcaaaggatttcattccagtcctttcgggacggtttcagacggatgacactgtatccgtccgggatttcttctgccagtttctcacaggcttcattccctggctggtcattatccaggcacaaaaatacagaagtaatctgagggcgttcagaaagaaaagccatcagtgccacaccggagatgccacccagactcaggtagcttcgtttcttccagtctttgggaaacaactggataaaagaaagcagatcaatggctgcctcaaacacaaacaactgattatccgtccctctgtgactgaatccgcaagatttatcagatccagccacatctccccggtattttatttcacctgtccccctgcaatgggcatatcttggaataccatctgcatcttttccaacaaacaccacattatggtgcttcttttcttcataaatatccccactgctgatccatttctccaccagatttttttcaatccctctgttttctgtcagatatctgatgattctatcattattttcctctttctctggcaaccggaagtcaggggacggggcggggcaggcactgttcctgccttcgccttcctccccggtcagcatcttgacagcttccggaaacgtagcattgtaaaattccatcacaaaatccaccggatagccacccctcccctgactgtgcctgtaccacctatttccagacactgttacactgtcatgctttttccaacggtattcctttccgcttttcatcagttgttctccctgtgcgttcagaaaagatacaagatctgtctggtttgctcttataatctgttcttccgtatactgcattttcctcatcctttcctgtctgtcctgctgacagactgttataaactcatctcatagttccgttttttcttcactgcctgttgttttgcatcacgctctgcacattctttcttcttttcatccagttttctcaagagggaagtcttcttttctggtttctgctcctccattttttcttctgaacgcccggaagtatctgcttctgccatttcccggtcacgtctggcaatgtctgcacagctctgtaccttttttacaaacgcaagttcctcctgatacggctgattgtctgctttcagctcttcgatcaccgactggagttcttctttctcccgtttccatctggcagttgggactttcccattttgatccagatgctgttttagttcccgttcacatttacggtaataattgatttcttttttgtgctgctgataatatttctcccgttttttctggaaaaaaaaatgattgtactcatcaatcaatggctggttcgtcttgattacctctgccattttttccagattctccagttcctttaactgtttccgcttttcggaaatttcttttttactgacagaaacaacaccgttcaattcctcaatccgttcctgcaagtcctccatcgtctctatctgatgtgtctgaagataattgatggattttgaaaattcctgtagatttgagagattcttacctcttcgtttcatctccgcatagaaattaggaagtggcggtcttccctgtgtctttttatcataatagtcctgcaggctttccaggagtgtcgggttctgcctgcgatccagctcggctttcatttcttcataaacagtcttcatccactgaatggattctttcagggaaatgaacatctggttgaactgccggattgcccggttcaattctccgatcaccgttttgattccctttttctccattgcccggacttcatatccctcgtggatagtcgggatcaggtcaatcccctgttctttgtaggaacggtggtcgattctggctgccatgtggcactctcgaaattttccatttactttctctgtccatgctctccgccactcctttaaaagctccggatcattccaaccggtagtggaaacagcattgaacatctcctttcctttagcatccttcacccggtttccatcctcatcaagaatatattcccgcctctgcttattgccccagattccttcctctgtaaaaggacggattggtacaagcacatggaaatgtggattatccggttcttcttcattgtccgattttccctcatggattgccagatctacgatcatgccacgtgccacaaactgctcctggcagaactctttcgccaatctgatattttcctcaagtgtcagttcattctgcagggcaatgtcaaacgaataggcaagctgcgccttgttgttcctttccacatgctccacctcgttccagagggtttccctgtcagtcagacgctccggcacatactccggtgtcaggatttctgtaaataccacacccgacttgcttgtataatcgtgtatcttgttgtaataactgtcaaaaatcctctgcccggaaatataggctgcggaagcgatcaccatctgtcctttccctctggatacatgtcttactgaaaaatgatacagtgccattagctgtcatctcccttctctgtttttttaactgcttcggcaatctcttgtctgtctttttgtgaagcagctatataattctgccgcacaacactcttgttgtaactgctgttacgcatctggttcattacctcctgaaattcttcctgttccagatctcttgacaatggaaacgctttctcaaactctgcccctttgacaatcagccggtgggaacgttctctgcgttccaccagctttttcctctgttccagaagatttttattgtggattgccgcctccagttcctgtctgctcttttccatatttgccttcaattcttccagcgacatggattcgtatttcggattttttgctctgctcactctgtcgtcctccttcttttctgtaaataaaaagaaccggttcattcataaatgccgattcctgggtataaaaaaactgaggtcattgttccataattaggaaatgctgacctcagtaacttttgaaatatttagttgtcacaacgatataatagcggaagttttcaacacaatccgaatatgcattcatctcaaatctgatatccggatttctttaactcttccctatacaattcagcaatatatgctggaccattgcaccacagctttgtgttctcatcatacagtgcttttcctgtctttgaacaaagaaaatctgtcaatatctcttttctgtccttgcccgtttcttctgcaatctcatctgtcaccatagtgataagaaggtcgattgtataattcattttttcctttggaattgttacttcagccatatcttctcacctttcataaatttcaggcactcaatagctgcttccgttttgaagcaatattgatcttttagtttattgggcaacaactgtctgatgcagaaatcgtctgcctccttatcgcctgctgtcccgaaagccccggcaaggtaagcagtaagggtagcgtttgttgcatcatccgcaatctttcctgcaatgatatcataccttgccatttcacgttccacttcgataaacatttttttctttcgatgagcggcaatgcaatgtaaccagtctacatctgcattttcaaaaatatgcatttcaagatttcctgaaaggttgaattcaaaagttgaaatatatccaaacttctgtccttcttcaattgttccggttgcgattgctttggctattgaggttctcagaaaactttctgcctgctccttggatgtagttaaataaaatccctgcccaaaatcttttctctttgcacatttggcaagatctggctcttttacctcacaataacttccatgatagagaacaaatccatcttttaactcaagcactaatctttatcccctttccttccagaaattctgtaatgtcttcaagcacagcttcatcaccctcacaatgaaaaatcccatagcatttttctatatatccaagaacatcggcttctttaaacaagtggataatctgttcaacaggtaaatgccactcttctgaagcaagccgaattaatcttgtctgcatgaaagtaatctctgttttctcactcattatgaatcctcctcaatttcttggtcaataaaattagaatttatctgttattaaacatctgcaacaaattcttctattaaactgtttatcaattccggtttgtctgtattagaattatgtccagctccttcgatccacttcaaaggaatttttctcttttggtgccatgctttgttataccgtatacatgaaccagcgtggtcttgcgttccgcatattaacagagatggacacttcagctcatatggcagattcttttccattgcatctgccaaaatgcgaaagccatgccccgcaatttgcgcataacgcttttgatcaccatcatagaccaacatcatttcacgcattagatttctgccataatcagacatggcaactccttccgttcccgatttcagaagcaatttccacggataatgagcatatacgggttccattcgcttcaaaagccagagttcaaccgcagtcacatagttccgttgcagcggtgcagagtcaatagagataaaacctgttaatcgatttgggtaaagctgtgcataagcctgtcccacatatccacccatagactgaccaataatgaccggcttggtaattttttcttgattcaaaatgttgttcagccattttgccttatcgaacaagtcgaactcaaaccgaaacggccatgaagaggcgtgtgccggtgcatcccataccacaacattatacttctccttgaaatgttgaatctgcttatcaaacaatctatgatcggcagtcaatccaggcagaaaaacaagagtaatttcatctgggtgtgagacgcttacccaatagtggattgttccgcaaggagtctgatatgttttttctttcattgattttccctccacaacttccgatttcacgctttctttcccctatatgtttgtatctgaggtattcagtcacaaacttcggggataggcacctgtgccgcaaggggaaacatccccttgtccgaaatctctgatttcgctgtatttcacggattaagattcctcgaatccgtgaatagcaccgcaggtcgcacgatacaggcagatggaattgcctgtatagaagtgcgctcttagctttgctaagagaattatatttctgtttcaccgcatattttattaagtgccacaagagagaaagtatcctttatcaaatgttttatttctcttgcatttgactgagtaactgcacctttctttattttgtcaaataactctctgtcttcaatatcataatcttccctcagtctttctatttctctctctgcaattttttcttttgccatacctgacaaatcattaaatttaataattgaatcaaaacggttatatatcggcaatcctaaatgttcttttatctcatcaattgttttataatttgaagtacacataataattgccttatttactaccactttataattatgatcttcataaattccttcatcaaataattgataaaatgcactatggaatatagataaagctttatcaaactcatcaaacaacaatacattagtttctctagccaaaagatcttgcgcaaagcttttttcgttatatcttccaccaaaaatataattggccgactcattattctgatacatagaaaattgttttcttaataattttccacccatcaattctgccatatattgtgcggattctgtctttccaagtcctgaatctccatataacaatattacaaccggcttgctttgtttaccatctaccagaggatatattgcttgaagcaatttcttttttgctctttcctgtccaattatcctttcactatattggctattaaatgtttgtatcatttcttttgaaacttccaaatatggctgttgcgtttcatgaataatacttttattaaatgttcggtatatctgttctcgaatacttttcggtggattttgaatgtacatatttgttatggacatttggaaaataaaatttataaagtttataattacatgttcctgaacactacagtactcatctgcatgaataacaaaatcctgaactctcggtttcttctttttcttaggctttggttctggctgccctggaatgttaacaaacacatccatttttttattaccatcatcaagtttcgctgccatttcactaagatttcttgcacttttcggaacaatcttttcaaaggcagaatcagatcctacaaaaatttcaatcttcttcacgtactacacctgccaatactatatcataaacatctaattctttttcttcttcagcagcagacttttctccctctacaatttcttctgctgtagtcttgtcttctgctggttgaaaatcaaactctttatcaatcgataaatgattttctccacaagttccaacctttattccgaaatatgtcagcttcattttgcttaaatcgacaagattataattgtttttaaatgcttgaaggttaaatctcaatacgcttttccgctctatctctgtttttaaaagcatgtcataataaccccgttcacctaatattgcctcatttaatttttccatatctattggcatttcttctttaggcacaattgtcaaatatgaactgagcattttatataatgtcacagaattttctggtgcataaacaccactattctcgaatttttttacgtgttcatctttcgatgctgcctgtatataatctgtaagcaacgtattttttattgttttgtcaaaagcactggtcagttcagcggaagcactggcatcaacttttccctgaaatgttgctttaatataattcaaaatattaaagccactttttgcctgagcttcaatttcagcaactattttagctattttttctttattttcctgtgttgaccaatcaagtcgtcctccatttgtaacatcaacataatcctgtgcagcagcttcatcaaaatatactatttttagaaactctattttctcagtgtttttatttttcaacttttctgctccttactatttctgttcctcacacaatttctgatatcttttcataagttctgcaacacatgcagcttcgcttttataggcttcactgccttttgtaaatccgtatgcctgcatgactgccatatcattttgctgatgtgcctttctcagttctggaggcatcgttaattcatcatacagcgttgcaagactgctatttggatacaatgctcttgcatcaagtattgcttgagcagtcttctctattttttccttttgctgctctgttggctctggccaagggaaattattgtatacaacatcttttgaataactatagtcactttttaatcgcatacatgttactcgcatccaagccatgtgaatatttgaaattataattccaaagtcatacagtgaagcatcagggattacctgaaccctatcggttacaattgttccagctttaatgaatcccataggaacataacgtcttgcttgtgaagatactctcggcacaatgataaaatctttatcaactggctgcgttctctgtgcaaaaagtgttggtgtagctgcaaattttcttattccagccgcaacgctattttctctcgcctctttacatttctttattctttccataatcattggacactttttcaagtcttctggatctgctccaacaagccataaacaccatcttttattccctttgatatattctgatgctcccaaaagaggatggatatatttctttgcattcggatcttttttaataaattcatttaagtcctcatcttcaataatcaaatttcctccatctgctggtttattaccatatatcattttaggaatatcacacaagggtttattccggctacgtactaatatattatctccatccatcagataacgattgatattttcagccactgtagttcttccattatcgtacaaatatttattcgaacgtgagaatttcgcaaatccaatgatcacacaatgtacatgagcttttacactggcttcactatcccatacaaacgttctatatgcaaagttaataatatcatcctgcataaagtcccaaaatctggataccgtttcaccttgaacaattgaatttgttgatacaaaagcaacttctatttttgttccccgaatataatctgacgcttttttataccaggcacaaacaaaatcaagattctttacccctggaaaaatattttgcatatcttgtttctgctcagctgtcataaaagtaaatccatgaaatggtggattccccataatatacgacacctgatttttgggtacaacactctcccaatcaatctgtaaagaattgccttccacaataaacgcattagttgtcaatggcagaaaatctaaattcatgtgaacgatgtcttctgtctctttcatcatctgagattctgcaatccacaaagctgtctttgcaactgtgacagcaaaatcattgatttcgattccataaaactgatcaatggaaacatgaatcggggaagattcatcaaagccaaaagtaatctgtcctctttgcaattcttttatgacttcattctccaatcgacggatactaatatatgtctctgtaaggaaatttccactaccagatgccggatcaagccaccggagatttgacagcttcgtttggaagtctctcaactttttatcttttgttctctgaacggttatttgctgaatttctttcagctcatttttcaaatcgtccaagaacagcggatcaatgactttatgaatattttcaatgctggtgtagtgcataccgccggagcgtcttgtttcaggattcagtgtactctcaaataccgcaccaaatatagtcggactgatttctgaccagtcaaaatctgctgaggctttttccagtaaaagatttctgatttcatccgtaaactgtggaatttcaatatcctcatttgcaaacagcccaccatttacatatgggaactgtgccagagattcttctatgtatggatctctgtcttctggttttgtatcaagcacctggaacagctcaatcacagcttttctcatatgccttgtatcaaattcttccagataatcatggaacatgccatgctgtccaaaaatgccggcatcctctgcatacaggcaaaaaaccattctgacacataggatattcaggcttttcattgcacgctctgttgtcggatcaacatattgttttgccagtgcatcatacagcaaccctacaatttcacctgcggcaatggaaacttccatttctctctgaagatttgtgtttccctcgtccacaagaaactgtaaccgatagtattctttttcaaggtcttccaactgaatgatctccggatcaccgcccggcttttccatatcataaatatagaatgactggaaattactggttacaatccatcttggtctttttgaatatggcagctcagaagaatatctttttgcctgttcaaatggtgtcagcatagaaccgtcagactgccggatagcagccgtcaggctcttgttgatacttttctgttcaatcatgacatgggttttctcaatatacccgtcaataaaactggtgtggtcaagatgtacctgatcctcaaaagaaataaactgtgatatttccgttacaccaaataccgttgtcagaagctccacccagaaaatctggctgtcgcctttttcatatccacggtctttccagtttttcgcaaacgctttcgccgctgctctttgctgtgtatctgtcattgcagcaacctcctgttattcatcatcagtaaattccatcatttcatcaacggtgcagtctagcttcttgcagattttctcaatcgtctccattgatacatactggttttttcccatccgggcaagaatgtttccacttatcccggtgaggtactgcatctctatccgcttcatatttttatctatgagcattttccataatctgttataacttacgcccataagctacctccatatttctcattcaaacatattttatattatatcacgatttcgttaggttgaatacctgtaatttttgatatcttcagtaaaatggaaaagaggatgccccggcaaagggcaacctctccaatcatttactctgaattagtcaaatggaatctcaccatctggtgcttccatgaatccgtccttatctgtttttgatgtttccgacgaatccgctccgataccgttatccttgttctgggcaaattcatgttcttccacaatcacatctgtggtataaattgtcttcccgtctttatccttataattaccggtgctgatacgaccaccaattacaatcctcattcccttatgaagatatttctgtgcaaactctgcactctttccaaatgtgacacaagaaataaaatccgcttcctgttcaccgtcacgtttatatcttctgtttaccgccagtgtgtatctcgccactgccatgtcattgtctttcccggcatatttaatctccgggttcttagtcagtcttcccattaaaattactttattcataatcgttaccgtcctttccgcagctacgctgccattgcatattcatcatcagttttattatccggcataaacattgcacatgcttccggtggattggtatcgtccggtgaaaacattttccggatcatttcatacatgatcggataccgatatgcgatttcttctcttgcaagaaatctgcatactctgtaaagattctttttcatttcttcatccgtagcaagcatggcagccagatggattctctcccttgtataaatcagatttgggcatccaaaccagttgatcagctgcatttcttttattttcagttctgtcataaactgctcctttccgggcattttgccctgtaaacattgtcatcagtttcattcgtctggtggtctggcgtgcgtttccctgtcacctgcagccgtctcagactgcctctgcctgcataagcaggtcactgaccataaggctccggtcagccgcccatcatcgggagtgtcattatgcttccgcttgctctcagaaaaagaaaggtcatggcagaactcctgttaggcttccagggtgcacttatcggttgtcaaggttcagcgaaggaacattccaaaacgtcctctgattactaaagtcaaatgacttgtcagaatgcaaaaaattcgtgatatttttttgcatttttatcagtttttcttttattttcattagtcccttcacatactctgtactgggacaagcaaaagcggacatgattttggagatttttgaaaaataattattcctctacctataaagcgttggaaatggtatttaccaacccccttttgcaagtttttttcgcataaatgaaatattccctcactaatagcaagtttcagagggcgtttggacggtactttcgcagaaaaatttattttttctactaatcacacgtggggacttgaagaatgtcagattatttttcaaaaaatcaaaaaagaagcaccgaccattacagtcagtgcttgtaagatgactattcaaatgttactgtccttttcacacacaagtctttcatagtccagaaatccacggatatacatttcttttgccacatgtccttccatggcattcttcgctgagataattctgtccaatgcctgccacatctcctgtccggcatctctgaggactggttccagtatttctatgtaataatgaatttctgcttccagagaaaacatctccggatcagattcaagaaatcgttccagttcccgttggtattcttcataatagctttcaatcaattctcttctcatatctggaatcccccttatacataaatcagttcctgcttgatgatttcagcagcccgattgcggatattgttgcagtggcgtacccattccataggattctgtctcttcagttcctcggtaactccctctgaacttctcatttgcgcttcgatcagctcaaagcgttcctgtgcctgttcattcagatctgccagatagctgtccagtctggtagtcagaagaagatatgtataagttccagatttatgttctttcagatattccttccgaagcattccccagaagccaatcggtctggtttcctccgggtagtaaagattcggtaaataatagtctctaacttttgtgtattcgattttcatggtgtctcctttcgctttgcatgaaattgtcatgttatctgcgtaggatgtgcgtttttcctttaaaatcttttcacatagaagacattaagtgcttgattccctgggactttgcacctgggttgtcgtttccatatccttctaacaggttaataacaccccatactgcaagtccggctccaatcgccaccacaagtgtctgcaaaatattgattgcctgattaaaaaacgccatattcgttgtctcctttcaaatctctgtatttctctggtttctatctttaagaagtcttttccggctctgcccttacgggtggcctttcatgatctctcaaatccatcacctcccaaaagagcaaagaaaaaagagctatgtgtccgaatctttcacatgctctgcttccttgttttctgtatttaattctcctgccagactctcttccgaaaactcatacaggtcaaattcctgtgtcctcgtcagtttcacttccatccgatgccgcatatacgcttccacatcaaactcatttttcttatcgtagtctgacagctccttataccgtttgtgtttggtaatatcgaacttgtcactgaaaaatggtcttacacctcgaagctgcaagatacatttgctgccatccatgaccgcaagttcgtcccggctcatcaattcctttcctgttttttgatagttcatcccgtaagaacggctctgtccacgggtgtccgaagtgttatataaatcaatcgtttcttttcccagcgtctcggaaatctcctttaaggtcgaactttccttaccgccaaggaataacatcgtgtcgcagttgcctaagattgtttcagctgcatctttgtagattgtctttaactgggactgcgactggaggataatggatgcagagatttccctgctacgaatggtggcgatcagcttgtcaaactttggaatctgaccgaatagcgataggtaagcctctggcgtttccacctcgggcttttcccccgctccacaccgtgcgtgatagtttcccatcacacggcgttccaccgactaagattactttttagtgcctatatagtcctcgaattgtatttcctccaactctctgtgttttcggagtttattgattttatctttcatttcttcggtcaactgtaagtctgtaagcaactttccaatttttacaggattcgttgctccaaccagttctgacacctcttttgacaggataatcaaattcctgtaagtgtcgtttcgctctcccttacgtggtttgatatgcacacataccatatctgatattgacagggcattgtgcgttaccgcacatttgcctttttgtgcgatatatctcgaaagagcgttgtctgccatctccaacgtagggtagagatgtgcattttccatcatgtatttcataacatcgtagctgatacagttttcgatgtctgaatacttcctcacatatttattgacttcacgccttttatatttggggtattcataagccacatatccaacagggataatcattcttccctttatccatcggaactgcttagactttccatacttttcctgaataaacttgctggttatctcgccttgacgttctatggggtaacagcggttattatgattcatgccgttactttttcccgttactttaaaggcgatttccgcaaagtctgctgataccatagttgccatacagtaatagttgtgcattcccataaccattgcattataaagacttatatttcggtctatctcgctttgtttgctcggattctttatatctttccaaacgtcacttagctttttaatgacctttgctttactcttgtctgccatgtgggaacgtattacccacttactgccttttggtacaaccttaaatttgataccgaggaaagtagtgtaattcttccgcaagtttgtgatacccgacttttcttcactggtctgtaaatgtagattttctgccaaccagagttttgtggcacacattacctttttcgccgttgcataatcccgacagaatagcttaaaatcatctgcataccttacgatatacatttctttcaaatcggtttttgctctcagcttattccatttctgcgttctgtctactgtgaggacgtttccctctttatcagtcttgttaaactctaaacctgttttaccctctttgattttgaacatttcccactgactggcaatccaccagtccagttcattcaatacaacatttgcaagaagtggggatagaatcccccctgtggtgtacccgtttcgggagtgattataatgtcattgaacaggatttccgctttcagcatctgcttgattatcataatcagctttctgtcctgtatgccgattccccacaactgccgaatcaacttactgtggtcgatattatcaaagaagccaacaatatctacatctactacaaagtgcagattctgcaactgtgccattttatagcattgtgtgattgcattctgcgttgaccgatatggtctgaaaccattgttccgctcatgaaatttcgcttcacaaatcggctccagtatctgtaagatacactgttgtatcagtctgtcccaaatactcggaatccctaatgggcggttttttccgttgtctttcgggatttcaactcgtctaaccttttttggctgataatagttcaacttatttctgacggttttaatgaccgattcgatgggcagtgactgtatcgctacaatcgttttcccgtctgtgccgggagttttgctcccactgtttttacagatatttcgatatgcaagtatgatattctgctctgacacaatcaacggcatgagcctgtcaaatgtctttccattctggctgtcctcaaataatcggtagcctgtttctttagcgtcatacctttctgcatttcgctctgctttgtttacaattcgttttgccatagtaaccagctccttatcggagaatgattttttcttagtcgcaccacgacagctatgaaaatctccattttggtgattactatataggcatgaaagaaaatcttagtatcggcttgaggctatccctccaccgcttattatcacggcttcacaggtactgtgcctctactctcacagccactaatgcacttattatagaaaggctctttcaatccctttccttttcgatacaactacggtactttttccgctgatacagtcagctcccgtattggctgctttccacgttccgcataacttaggattgttgcatttcctgttgccgccataaatgtcactgtttcgcccggctccatctcatacaagtcaattccttcattttctgcctgatccattacttctgaaacagtcagaccagattcttcatctgttgttacttcctgtccatctgtaagatcagttacaatctcttttgctctgtccgaatcagcatcttcctccgcattaccggaatcttctgtttcaccggcatttccttcaccagctgtattttcaaaagaactctttgtctgtgcttctgtttccggctcttttactgtaatgtttctgcttactctgtaagctgggtgaccgctgactggctctactgcatagacagctttgtaggtatccggtgtatgtacgtcaaaatctgtaccagcttcactttttgcttcatgaaataaaactttcacctttttttcattcacgccctctataccggacagatcgacttccacctcaaattcttctccatagggaatctcaatatcctttgcttccacaatttcatctttatcaagagtatcctgcacatcctgcagttctggatattgctgttcaaatgaagttggttctggttctaattcagaagcagaaaccgtgactggttgaacgatgacagacgccaaagttgcaactgccataaatcccgacaagaatcttttaaatcgcattttcattttgactgaatcctctctttcttcaataatttactccactttcgttcaggcttacacctgcatgaatcaatcataggaaccatctcccttgtgtcttggattgacttttaaataaaagcaggattgagctattaagccgcaagaggtaattcgtaatcattcctgccaagggtgcctctcatccattgcccttcacgttgtcaccgaatgcccgccgccagatgcgtagctgggaaattcaggtatcctcttgctgctgatatgaaattgtcaaggttcacttttaggagggaatttattgttttgaattaaaatagacatttgcccctccactaaccgcatgtgtgaaagggcaaaaattaacctgtttgaaatttttttagaaaattttttgaaacagcaaaaacttacaaagtttccagcctgtcttttagtttctgcaatactttgtttttcctgtttctgattgtctttgtacaacacccgaaatactgtgctgtttttttaactgtgtactcttcaaaaaataatagtcttatcaattccatttcttcttcagacaaatatttcagtgcttcctgcagctcttgtatttctgacaccctgatgactatttcttctggtgataatatatgcaaataactgttgtaactcgtttctcctactttttctattccgcatacaccatttttctgcattttttcaagctggtatctttcttttcttcttgactggtaccatgccagatatacgtctctggtaacttctacgagagtttcatttacacgcagcacataccgttgtctttcctttggttttttaccacgcatcttttattctcccttctgaagcactccggtcagtctgcctgcatttcttctcattttctgctttgcctgtgaaatacattttgatactgccggttctgtaattccaaacacccgtgacacttctctttgtgtccgttgctgaaaataaatttgatggatcacctgtctctgccggtcagtcagcagatccatgaattctccaatagcttcttctataatcagtttttcaagtatattctgccttttatccaccaattcgcaccagccttctgaaatatggctgtatgaaatgcaattattatgttctcgtacctccctgttcctgcacagccgatcttcaccttctaatatcaaccgcacataccagggctgattatcaaaaaaatcttccttaacaactgttatttttcttcctgcttcatatacataatctcgacaggtaaataaaggaaaaaccgttccataatcacctgcacaatagaaaacatatcctgtctgatacgcaataatttccgcaccatctatcagtctatgctttacaactgccacatcgttttctctcaaatacctggcggacggaacctttcttttttctttcctgttacctacaacctgtttcaattcctgcaatgtcagcataattaccacctttctgcctactggcaacaggagcccatcagcagaaaggataggattattactgctttactggcaaaagggcagtaaaaaacagcttccggcacacccgttttttttaacgagagcctgaaacttccttactgccctttctgctaatttacagcatcctctattttattttccgtctgatgtcccggtcagacttctttgcatttctttccgtttttatgttcttttcattttccatcaaaacagaatagtctcccattgcatcatagggacactgcttccgatagattaaattttcttgtctggtcatcaatcctgtctcccttccttgtttctgtctctttctctctgtttgctattttaacagcacaaaaaactattatccttagcatatatggggagtttttttgttttacaccccatatatggtgaaatttcacctgtactcattaaaactgtctatcagcgaatctattgtctgcataataattttctgctctttccattccatcttctgaatacgataaaatacttcctcaaactgctttcttttttctgcatcgtccccctcttttcccatcaggatattggcatctgtttccaggatctcaatcatcttcctgaaaatctcaacagacattgccgtttgccctccttctatcctgctgaccgtattgacactgatacctgctttttccgcaaaagattcctgtgacaacttcatttcctgcctgcgttttctgatccgttctcccaattcaataagttctgtggaaattgcacgattgctcaatacggtgtctcctttcctgcaatttatcccgactttacgacattttgtcgcaaagtttccagaaaaaaagcagctaattttgtcttagctgcttttcaaaagatctatttcattttattctcggtattttatgtattcctgtaataactgtgagcaggaaaacactaagataaatgattgcctgtccaatcattgccagaagaacgacacttcctatcaatcctccgatcagaaaattcatggtccatactgccagtgttcctccaagatcaaaatctcttggaaccatccagacacacatttttccgattccaaacggtatccccatcagaagtaacagcaagaaataattgcacttcccatcctggatacaaaacgttcttaatactgcaaacaatactgtaatcaccagcactggtgctatcacttttttaatcatcttcttcatgttcctttatcctccatacatatcgtgattaacttctgcctgataataactgtttatcgttgccggggcattatacagggcggtcagaagatacgctttaatattcccaatcttggtcgtattccgattcagacagaacagcacatattcgatatgcgaatagttcaatttcataaacctgttttttaccaaagcaactggtttttctactcccgcaatgcgaatcatactgtcctccggcatcatcataacttcgatcatcaactccaccagttcatctacatcttccttggcatgatattgataatctatgttttcatgaatcacctcacaatatgctctcatcttctccatcacatcttttttcttttggggattacctgatatgattggataagattgatttatctcagtttcactaatatcagtcttgttaatatcagtattattagattgtgatttcgggtattctggatttgtgatttccactattctggaatgatgattttcactattttggaattgtgattctggaaattctggatttgtggtttccaccattcttgaattgtgattttcactattctggaattgtgattccccataatcctgaattgtggttttcactactcctgaatgatgattttcacaattcagagaaatgcctgttttccccttgttttctgcttcttgttgcaaatctgcacattcctcatgtcttttctgtttcgattgcaaatctgcaatttttttatgatcttcctgctcagattgcagatctgcacaattacctgtcggcttttgatctggaacctctctgatcataaaatttttcacataaataacattcggttttcccagtcccagacgtttcttctctatcaatccaatcccattactgctgtccagctcttttaccagtttcactgccttttgagttccgcagttcatcaactctgcaatttcttccacagtgaaaataatgtatactctgtcctctgaatccagccatctgttcttaatgctcaggctcatacggtctagcatcagaccgtataatacctttgcttcacaagaaagagttttaaagcatggttcggtaaacagcactttagggacacgataaaagctgtattgttccgcttccatccccgtaaaataatcaaactgtatcttctgcatctgctactccttctttgttttctttccatttatccaaaagcataaaaatgacttcttctatctgttctttagaatatgtctccggaaaataatttccaattttctttgccggaatcgtcacattgatcttactgctttccttttttaataaaacagcatagatataactctggtttaattttccatttgcactgcattcttttaactgttctgcctgttgttttgtcggaaaaatgctactgttggtaatcacttccagaagccacccctgttcctctggcttcagataagacagcttttctcccacaatcataggaattttattattgtccacatattccagcaaagcatctgataatgccgccagacgtatatacctctgtacggttctcccactgtccccggcagcttccccaaccatatctgctgtatatttctcacctttacttccctgatgcttcattgcatcatatttcatcttataggcatgagctttctcacttggcagtagattttcacgctgaatgttggaatcgaccataataatgaccgcttcatcatccgtataatttcggacaagagctggcaatgtagtctttccacacagttcacagcctctttttcttctatgcccggaaatcatctcatatccgccatctggtcgaggtcttaccagcgcaggagtcaaaacaccgtatgttttaatgctctctacggtttctgccattttttcatcatcatttacatggaacggatgatttttaaagggatagagctttgccagatctatttccacaacctggttcatactcttttccggtgtttcctctaatcccagtaattcatcataagaggtaagctgaatgtcttttttcggtctacgcatgtttcaacacctcctgaaccagttccagatagctgtctgcccccttgctttttccatcataggcaaagatacttacaccctccgatgctgtttctgcaaggctttctgttctcggaatcgtctgctcaaaaatcctaatgtcacttccgtatgtagttttgattgcctgtttgtttctctttgcattattgtaacggcaattatccattgtgaataaaatgccttctatctgtaaatccggattgaacctctgatggattcccttaactactttcagtaattccatgagtccatctgccgcataatattgtggctgcactggaatcagaacactgtccgctgcactcaaagcattgagcgtcagcattcccagggatggcatacagtcaatcagaatataatcatactcatccttcagcagttccagatactctttcagcaccttttctctgtcctctactgtaaataaagacatatccattccggcaagcaatttattggacggaattaggtcaacaccttcttcatggtgcagaattgcttctttcggatcaaattccagtcccatgataatgttctccatcatgctttttaatgttaccttgagatttttagggaatcctaatcccattgtcaagtgcccctgtggatcagcatctaccaggactacttttttccctgacttcaccagtccggctcccagattgattgttgtcgttgttttggctactccgcctttctgatttgcaatagcaattactttacacatatactttcctccgatttactctttttcttctacttcaacataaacacgaaaatatttgcttgttcctttgttcgcataagcatccgatacttccagaacatccaattctttatgcttttccaaaatacgacggaaccattggatatcctttaaagtaccctgtaatctaattttcagcatacatatcctcccagtctttgtaaaaacaatactctgggtaacggattttaatggcttcccaaaaataccgggcatatccgcagcaaaacagatcttctacggtataatactgacactcttttaactgatcttcctctacttcataatctccgacacttggggtcccattgcagtaaagattaaatgccatgcggacgatccgtaaacttccactggtctgccaaccttcctgcagggattccgtttttacacatccagttttaaaattatagattttattcacattttctcttgtgtctctgtcgatacccaggcaataaaccagagcctgatgataaacatcctgatatctgcattttttcagatattccatataaaatttttcgtgttccttgctcttgaaagtaattgtgcgagaattgctattctctgctcttaacgctgtgtttgtcatttctgttttcctcctaaattttaataaaaaagacaccccatttctggaatgccctataaaaaatagggacacccgcttttaacaagtatccctataatctatcaattatttgatagctctctattcattttcatattcaggattttttgtgttccccgtaccgaggtctaaggcaacaattacggttactctctgcacaagtatcttttccttgtgattttcaccgattttgttgaaactgaaaaactctacaaagtgcgtaaattcaaggatttctaggtatctttcctttgtagtcccaccactgtctccacatggactccttgcggaaacatatcagtagtagaaacccgcaccagttcataatcctccgcacacagcaccttcagatccctcgccagtgtcgcactgtcacagctcacatacacaaccctctccggcttcattttaaggatcgtattcagaagtacctcatcacagcccttccgtggcgggtctaccacgataacgtctgcataaacgccattcttctcatactctctcggcagcacttcctctgcttttccgacaaaaaactctacattctcaatgccattgagcttcgcattctctcttgcattgtcaatggcctgtggtacgatctccacgccgcggacgaattttgctttctgggccaggaacagggagatagttccgattccgcagtacagatcccagacagtttcatttcccgtaaggccggcgtactccagagcctttccatacagtttttcggtctggatgggattgacctggaaaaaggacaagggagaaatctgataggaaatatctccgatgctgtccgttatataggactgtccccaaaggaggcgaagctgatcacccaggatcacattgttccgttttttattaacattgatggtaatgctggtcatttccggaatttcacagagtgattccacaagagccttttctgcagggatcttatctccgtttaagatcagacagaccatcatctcatctgtatggaagccgtaacgaatcataatatgacgtacaagaccttttcccgtggcctcatcgtagggctgtacatgatatttttccatgtgtccgatcacacggtccaaaacctctttattctgtttcactcccagaatacattctcggttatcaatgatggagtgggttcttcctgcataaaagcctgtgatgatctttccgtctttattttttcctaccggaaactgtgccttgtttcgataatgataggggtcttccatccccatgatcggttccatatcaagattctgaaaacctccgatcctttccagatgtccacgaacctttttctctttaaatttcagctgctgctcgtaggataatgcctgaagctggcatcctccgcactggcgggcaatagagcaggcaggtttcacacggtatggagacggtgtgatcacctccatcaggcggccatagccatagttcttttttgccttgatgatcttggctttgatccggtctccgatcacggcgtctttcacaaaaacggtgaagccatcggctttcccgataccttcaccgtcaactccgcaatcctctatatctaaagtgagtatatcgtttttacggaattccatgtattaaatatctcctgttcttcttaaattggactcaaaaagccggttgaaaccaagccattcttttttgcctttgtctgcgtggaaaatttctgtcagtgtctccatccttgcatctgtattatctgccagattcagggcaactgcctccgcaagtgccggtttcttgggagaaccgtactccagctcaccatgatgtgcaagaatacagtggatcacctgattttcaagcttctccggaaaatcagggatctcttttgcaagatcatgtaccatctgtgccccgatcacaatatgtcccagaagctgtccctcatctgtataatcattcatcggaaaagcagaaagctccttcgttttgcccacatcatgaagaagtgcggttgtgatcagaagatcacggtttaaaaccggatatgcatttgccatgtaatcacagagacgtgtcactccaagagtgtgttccatcagtccgccgataaagccgtgatgtacggtcttggctgcagaatgtccctcaaatatcttcataaattcctgatcttctacaaaaagcttcttcagaagctgggaaagatagggattcttcacactgttgataagctctcgcagctggctctgcatatcatccacactgttctcactggtaggaagataatctgccggatcatactccccttctcctgccttgcgtgctctcttgatattcagctgcatggcgcctgcaaagcttgtcacatctcccatgatctcaatgtaatccaacgcatcaaactcatcaattcccagagaattgggatcccagatcttaccatcgatcacacctgttttatcctgaaggatcagattctcatagggcttgccattcttcgttgtagctgcctgtttctgtttgcagagatagatcccgtttactctgtctccctcatgtaattcatttaaaaaacgcataaaattcttgcctttctgttctttttactttcaaagcagacatactcacgaacacatccgcttcacactttgcattcatagccagactttctttatgatctttggccgcatcccggtccaggctttctggcatttctgcacagtttccacttacttccgggctttattcagtatcataacacattttactttcctttgctatggaaatcatgtaaaataggaaacgaagtgtttttttgcatatcctgtgttacgcagaaaaacacggaatcaacagaagtaacaaaaaggagtaactacagcaacaatgaacaaaaaagcatacaaagcacttgaatactataaaatcatagatctgctcacagacaaggcctcctcccccatgggaaaggatctctgtcggaagcttaccccttccacagacattgaagagatccggtccatgcagttgcagacacacgatgcccttgcacgcctgttcaaaaaaggcggcatttccttcggcagtgtcaaggacatccgtggcacattaaaacgtcttactgttggcagcgccctgaatgcaccggagctgctttctgtctgcagtcttcttgagaataccggtcgtgtaaaggcctattccagaagtgaccgtgatgacggaatgaccgattcccttgacggaatgtttgcggcactggaacctctgacaccccttagcacagagatccgccgctgtatcctttctgaggatgagatcagtgacgatgccagcagcacgcttcgtcagatccgccgcagcatcaaagccaccaacgaccggatacacacccagctttcttctctggttgcaggaagtgccaggaattatcttcaggattccgttatcaccatgcgcgacggtcgctactgtatcccggtaaaagctgaatataaaggccaggttcccggtatgatccacgaccagtccgccacaggttccactcttttcattgagcctatggctgttgtcaagctgaacaacgacatccgcgagctggagctgaaagagcagaaagagatcgaagtgatccttgcatccttaagccagcaggtagctgctgagctggaggctattcacgcagatctttccatcatggtacagctggactttatttttgcccgtgccgcacttgccatggacatgaacgccagtgaacctgttttcaacacagaaggccggatccggcttcgccaggcccgtcatccactgatcgataagaaaaaagccgttcctattgacatccgtctcggggatgattttgacctcctggttgtcaccggaccaaacaccggtggtaaaactgtttctctgaaaaccgtaggtcttcttaccatgatgggacagtcgggtctccatatcccggcgctggatcgttccgaacttgcacttttccgcgaggtttatgctgatatcggagatgagcagagcattgaacagtccttaagtaccttctcctctcatatgacaaacgtggtttccttcctgaaatccgcagatcaggattccctggtcctcttcgatgagcttggtgcaggtacggaccctaccgagggtgccgctcttgccattgcgatcctgtcacatcttcacgagcagggtatccgtaccatggcaaccacccattacagcgaactgaagatctatgccctctccactccaggtgtggaaaatgcctgctgtgaattcgatgtggaaaccttacgtccgacctatcgccttctgatcggtgttccgggaaaaagtaacgcatttgccatttcttccaagctggggcttccggatttcatcatcgacaaagcaaaggaacagatcagcgagcaggatgaatcttttgaagatgttctgacatccctggagcagagccgtgtcaccatcgaaaacgagcgtgctgaaattgcccgttacaaagagcaggtagaagagctgaaaaaatcccttcaggaaaaagaagaaaaactggatgaacgtaaagagcggattctcagagaagccaatgaacaggcacatgcgatcctccgcgataccaaggaatacgcagatcagaccatgaagcttttccataaattccagaaggatcacgtagataccgcttccgtggaaaaagagcgccagaacctgaaaaaacgtatgtcaaaagccgaaaatggaatgtcttccagacagcagaagcaaaagccaaagaaacagctgaagccatccgatctttctcttggcgataccgtaaaggtgctcagcctgaatctgaaaggaacagtttccagtcatccggattccaaaggatatctctttgtgcagatgggtatcatccgttccaaggttcatatctccgatctggagcttgtggacgagccggtgatcaccactccgtccatgcagcgtaccggcgccggaaagatccgtatgtccaaggcagccagcatttccacagagatcaatcttctgggaaaaaccgtagatgaggcagttgcagagctggataaatatctggatgacgcctatatcgcacacatgaaatccgtccgtatcgttcacggaaaaggtaccggtgccctccgcaaaggtgtccacaattacctgaagcgccaaaagcacgtagcttccttccgtctcggcgaattcggagaaggcgatgccggcgtgaccattgtagaattcaagaaataaaaaggagctgaagccatggctacaaaacagaaaatcctcattgttgacgatgacaacaacattgcagagctggttgctctctatctcacaaaagaatgctttgagactaagatcgtaaatgacggcgaggaagccctgaagcagttccatatttttcacccggatctgatccttctggatctcatgcttccgggcattgacggataccaggtatgccgtgagatccgtcacacctccgatgtaccgatcattatgctttccgccaagggagaaacctttgacaaagtcctgggactggaacttggagcggatgattacatcatcaagccttttgactccaaagagctggtggcacgtgtccgtgcggtactgcgcagatttcatgtaaaatctccgtctaccgcgccaaaggaaaaatgtgtttcctatccggatctggtgatcaacctgaccaactattctgtaacttatatgggacaccagatcgatatgccgccaaaggagctggagcttctctatttcctggcagcttctcccaatcaggttttcacaagagaacagcttctggatcacatctggggctatgaatacattggcgataccagaaccgtagacgttcacatcaaacgtctacgtgagaagatcaaggataacccaaactgggctctttccacagtctgggggatcggttacaaatttgaggtaaaggattcatgaaacagcatctttatactaaactgctgatcctgtactttatgctgggcggaatctgctttctgctgctttcctccggtggctcctacctggtagaaaaaaggctggagcgctctaccggagagtccctttaccgcactgccagccagctggtttccaaaaatgaacttcgtcaggctgtaaaaagccccaaaaacgaatccctcaccctggctctttcctctgcagcagcctttcaaaatgcagatttctgggttatggatacagatgggaacgttctgataaacacaaaccagcagtcctctgattccggtgatatcaccgtcaggaacttccgaccggaagattacgaagatacctgctattcctccggtacgttttacgggacattaaaaaccacacagctaagcacagtcgttcccataaaagatgcggatcaggtgatcggttatctggtgatccactatcctatgaaaaacctctacgagagccgcagcagtatcgtagaggtcatggtgctgatctttattgtgatctatgcactgtttttcagttttcttttgatctacttttaccgggtccacaaacctctgaaagaaatcttaaagggtgccctggaatttgccaacggaaatctttcctacacgattccagtagattccgaagatgagatgggatatctttcccactccctgaattacatggcagacaagctgaacaaaaacggagaatatcaacggcagttcatttccaacgtgtcccatgatttccgctcgcctctgacctccatcaaaggctatgtggaagccatgctggacggtaccatcccaccggaaatgcaggaacgttatctgaaggtcattgcttttgaatccacccgtctggagaagcttacccgaagtctccttaccttaaacgagctggatgtcaaaaagcgtatgatgcatttgcggcgttttgatatcaatgaaacgatccgtaccacagccgccaccttcgagggaacctgttcggaacgaaatatccgtcttgagctcctccttgcaggaaaagaactttttgtccgtgcagatatggaacagatccaacaggtgttgtacaatttattggacaacgcagtaaaattcagcagtgacaattcttccatcacactggaaaccacagtcaatcatggcaaggtttttgtctcagtcaaagaccatgggaccggaattccaaaggagagtctttcaaggatctgggatcgtttctataagatcgatgcctcccggggaaaagaccgcaagggtaccgggcttggccttgccattgtaaaagagatcatcaacgctcataagcagcatatcaatgtgatcagcaccgtaggtgttggaacggaatttatctttacactggaaaaagcaaaataaaacatcaaaaacctctgatccggaaagctgtaaaagaaatatctctcaatatttcctacagtatttccagatcagaggtttttatttactctttgcaggcttacttccagtcgtaatttctcagatggccttccagattcatatgcgtaaaattatgctgtcgcagcgcctcataaagcacaatggcaactgaattgcttaaattcagggaacggatatctccgatcatcgggatccgcacgcaggtttcctgattgtttaccaagatatcctccgggattcccgcactctccttgccaaacataatgaaacagtcatcctcatactgcacatctgtataagtctgaggtgccttggtggttgcgtaataaatctttgctcccggattctttttgagaaaatcctcatagtctagatatctggtcacatccagatgttcccaataatccatacctgcacgcttgatggccttttcattcaggcgaaaaccaagcggttcgatcagatgcagcctggttcctgttgccacacaggttctgccgatatttcctgtatttgccggaatttccggctcatggagcacaatattcaaaactcccatttatttttcctcttttctatatagcattaaatatacaaaatatgcattcgcaatccgcttcgctgcctgctcatgagatcaataagccaagctttctgatctcatcttctgccggccgctccagatatctggcatttccgccgctgtaaagaagccggtcatttccggaatcggtctgcccgatcactgctgccatgatcccctctcgccgcagctgctgcacaaacgcatcgcctccacggattcccagaagaatacttccgccggaaagaagcttatacggattcacatcaaagatctcacagatctctatggtttcctgtcggatgggcacacttcgaagatccgcactaaggcctaccccggatgcctctgccattttccagagggcagcaagaaaaccgccttctcccatcagataacgggcgctggctccggattcttccgccattttccagatcttattattctctttttctgttcctgttccgtaaacctccggaagcttcacagcatcctcaagaaaccgttctgcaaaaacctcccgcagcctgtcatgataattctctgtgatccatgcagttccttctgcagccacggggcctgccacgatcagttcatctcccggcataagccgtccatctatttctgcctgaagcgcctccagtgctttttttccaagtttcatagctgccgccttagtaaatgataagcgaaagcacagtcggaactaccattgccagtaccagaataactgcgatgatcgctgtgatcacttttctttttttcggatcaaacattcccataattattattcacctcatctgtaatatccgttaatcgcgcattgttggtcaaaggatccctgtctgtataatcaaaaagaagcttctttccatcccggaacacctcgatatgggcagtcttcgggatttttttcgctttccggtaatcccagatcagccgctcatacggcttctgatctgaagcaaaggatggcctgctctttaaattctctcgaagataaagatccaggagcattacatcggaaagtgcttccgcagggatctctttccgttctccggcaaattccatgagaatctcatagcgcctcatcctggaatgggagatctctgagtatccttttttctcataaaacctgccaagtgcctcgtacatccggaaaggatcgtcaaaatactgctccagaaatacaagggtatttttgaactgcccactattataatacacttccaccatactttccaccattttcagccttaaaatctccccgtaggtcagccaggctgtggaaagcacctcatagggttcccggtccttgtaaaggatctgatattccccggtcatttccatcatgtgagatcccttcagcaccttcagaaaaccaagctgaaactgttccggacgcagtgcataaacatcgcagaaggatttgtggaagctgtcgtagccctcatagggaagtcctgcgatcagatccagatgctggtggatatttccaaagctgtggatctgctctacaatccctttcagtttttcaaaatccatggttctccgaatggctttgatggtctgaggattggtagactgtacaccgatctccagctggatcaggcccggacgcatggttttcatcagagccagttcctccgcacggagaagatctgctgaaatttcaaaatgaaaattggtgatcccgttatcatgctccgtaatatactgccagatctccatggcatggtcatgcttgcagttgaaggtacgatccacaaatttgacctgaggaactttattgtcaataaaaaactgcagttctctttttacaagttcaatatcacggaaccgaagcttcttatctatggaagaaaggcagtagctgcaggaaaaggggcatcccctgctgctctcataataaataatgcggtttttaaactctgtaagattgctgtatgcaaacggaaccttacttaaatccatcaattcccgccagcccgtgtgtacaatatccctgcctttgttttcatcacgaaaagccactccgcggatcccgctcaaagtttccggttttctttctatataataacctgccagttcatggaaggtttcctcgccttctcccaccataactccgaaaaacgcaggattctttttcagaaattccatcgcatcgtaggatacctccgggcctcctgcccagaactccacctgtggaaggattttcttaagatccggcaccagctccctgacaaaggagatattccagatatagcaggaaaagcagaccacatccggctgctccagataaatatcttttaaaatgtcatccctgatctgattgatcgtatactctttgaccacaaccctggagctgtattctccggaacaggatttcaggttatataccgcaagattggaatggatatattttgcattgcatgctgcaagtaagattttcaaattttatattctcctaacttctgtcggataatttctttccccggcagttttcattatttctctgttgagccttttcgctttatgattataacgttcccgccaccggatgtaaatagaaaaacaggggttactgttcactggtaatattccgcgaggtgttttttgtgagcgaaggtcacagaaaacccgagacataccgcgcgaatttatgcgatcagcataaattctgtgcatcgcgaagcgtgttgctgagaacggagtgaacagtaacaaacagggatttccctcctgccgcaaaaatgccgtttttgttgtatttccatccaaacagcgttaaaatgagtactatatatttttataaaggagtaatctttttatggatcgaaacagctgtctgaattattttcaggcgtttcccttctgggaacatatgacggaagaagatcggaattttcttcttgataacattcgcgagcttcattacccggcaggtgctgccatacagtctgaagagcgccagtgcctaggaactctttttcttctgaagggagttctccgtgtttatctactgtccgctcagggaaaagaggcaaccctgtaccgtttaaaggacagtgacatctgcactctttccgtctcctgcatgctttctgccattacatttgatgtacagatcgatgcagaaacagattgtgatctgcttctgcttccggcagttcctttttcccggctgatgaaaaacaatatctatctggaaaatttcatctacaaacggacaactgaacatttctcagatgtgatcgcaggaatcgaacggacattttttatgactctgactcagagaatcgcagcctttcttctggatgaagctgcagataccggttccgatgagctcactctcacacaggaagccatcgcccgctccatcgggagtgccagagaagctgtcagccgcagccttaaaaaaatgaataaagacggctctatccagatctcacggggatcgatccgcattctggataaaagacgtctttatgaaatgatgaatactttttaatttgaagatgttttaggtgccggctgcaagatccaccagaacagcatcggcataatagtcattaccggccacatataacggatcatcccatttacaggagacacaagacatatcagtatattcagcaccggtatggcaaagatcaggagttttttccattgtttcttcaccagaagatatcccatcagcaacagagtaagccaggtatacgttcctgcacttaagataagtcccagcccaggtgcacgcatccataattcatcataaagcctgaatagatactggatcttttttgggcccacatagctgacatcaatcccggattttttctgatacagtttatctatgtaaaaccggtacacgccctgctgtcctctttccatatggaacggatcattatagctgtaggtgttattcaatgtcgcctggacatatactcccggatgacgacggaacatggcaaaccaggctttaaaataatctttcatgtatccatccaatttaggatcattatcatcatctctgaacctaaatgtaattttcacaggatccgacagttccggattatacttctcggcaagaacatcataatccaggatcctgtttatcgctttcttctcacttgcggttacatcatccggatattctctcagatatcgggcagtctgctgaaacggtaccgaaagcatttcacatcgggatccaggtgccacgccaagggcaggtgctgcccccttttctacgcccagatagcaggcaaaaacacagacagccacaataaatgcatatttcctcgcgccctttaccaggaagaaaaacaaaaggatcaaagaaggcaggactagatgaataccattatttcgggtaagacaaacactgattcccagaagaaataaatatactgcctttctcttggaaaaggaatgacaaatatctatatacactgcaaaatacaaagtaataactgccgtatataatccatctttgatcactgcctgggcatagcttccaaatatgggaacaaatgcaaacagcagaacagtaccaaaaagtatccattttggagccttccatctgtacagatagcggactaccgcactgtaacaccagatttccacagaagtaaacacaatgacgatcagaaatactccaaaattataacaccagacagtttttccaagtgtcagcagtccacccatgatcatcgtcaggacccatggatgatgattgtccagcggcatagctcccaaaaatacatccagctgccgaaatccatccgccgggatcgaacctgggagaaatgccaggataaacggtgtccatccaatgatcatagatatctttgccaggcggaaccacattacttcttcctctctggccgggatacgcccgcaggcctttcggaaaaactccatctcaggaatcctccagaaatatgtgattcccatatcacagataatataaaatcctataaagcatccggctgagatcagaatctgtttctttgcgccaaacagaaaatcccagtttccatttgtaaaataagaagttccaagaagcattcccgccgaaaagatcactgccaaaacatgtgcctgccagtttctgtatttccggtagccctcccatcctttcacgtataaaataagaagcaggatccatgcaagcaagctcgtgcatcccaatccattataaacatcgctcattttttctacagaagtatttccatccattggaaggcccgtaaaagaaaaggccagcgctgtgatcattgccgcgatcacaggcactgcattcttttttattattttctcatccatatttttattaacccttgtctaaaattttcagtaaaccaacaatgctccggaaaccgtttcggttcccagagctgtatctgttttttctgttttctgttttggttactgaagcgctgcctcaagctctgtctttgatgtcagtcccacaaaacgtgcggtctcttttccttctttgaataccagcagtgtggggatactcatgatcttgtactgctgtgccagtgatggctctttgtctacgtcaaccttgccaacctcatatccggcttctgcaagctcttccacgaccggagcctgacgtctgcatggtccgcaccaggttgcccaaaaatctaccagtaccggcttttctgcctttaatacctctgtttcaaaattgtctgttgtaaaaacttttgccatgataaaattcctccttgatcctgtatttatttttagtatcagcttatgcttacgccttcagaagcttccgcacatactgacaggcggaaagtcctgcctgggcaccgtcatgaacagcttttgccacctggagaagtccaccggtgcaatcacctgctgcatacagtcccggaactgtagtctccatctcttcattgacccggatatttcctttttcattcagttccgctccgatctggcgggccatctccgagcttccggctgtaccaagtgctacaaagactccctctgccggcacaaaagaatctgctccggtacctgcttcctgcatggacacatcacttttcaggcggatgccggaaacacgctcatccccttcgatcgcctggatcttcatggtgttaaccggaagcggattttctcttgaaaattccggtttctttccatctgtaaagatcgtcacacgggaagcggtattggaaagttcttctgcttcatgaagagcaaaatcactgtttccaagcactgccacttcttttcctctgtaaaaaaatgcgtcacatactgcgcagtagctgacaccttttccctcaaattcctttactcccggaatcctggcagaagctctcctgcttccggttgccaggatcacactgcgtgcctcaaaatctcctgcggtagttttcacctcaaaagtatcaaaaccacccattcccacaacctgggcatccaggatccgtactccaagtgctcttgcctgggcaagacctctttcgaaaagctctctgccggacagcggctgctccagtccgtaatagttctcgatcttctccgctttttccagtgaaccgatccctgtatttatgataagcggatccatatttcctcttgccgcataaagtgctgccgagatcccggccggacctgctcctatgataatgatattctccatttcagacacctgctttcttcttcgtttggatctgttctataatatacgcttcgcattggtctgtttctgtgatcaggtcacttttccttcatagaagtcattataccacattcccccaaaattacacctttttttcaatagcttttatttgcgtctgtttctcttctatgctattattataacgactttaaaccaattaaatgaatcaagatgataccccctgcgggatcataaatatctgcttgacctgtaaggaaacggattccttatatttatcaatagatcatgaatcataaaaaggagcctaatctctatgagaaattttgaatattttacccctacccgggttattttcggaaaagatacacaccttaagatcggcactgttctaaaagagcagaactgcagcaaagtactgatccattatggcagccacagtgcagtaagctccggtctgatcgatgagatccgatcttctctggatgaagctggaatttcctatgtcactcttggcggtgtggttcccaatccccgtctctccaaggtacgtgagggtattgagctttgccgcaaagaacaggttgattttcttttggctgttggcggtggcagcgttattgattcctgcaaggccatcggctatggacttgccaatccggatacagatgtatggaacttttttctccgcaccgaaaccccaaaagcctgtcttcctgtaggcgttatcctgacgatcgcagcttccggaagtgaaatgagcggatcctgtgtgatcaccaatgaagagggctggctgaaacggagtagtgcccgcaacgatctgtgccgcccacgttttgctattttaaatccccgcctcacctataccctgccgcaatatcagaccgaaagcggctgtgtggatatcctgatgcatactatggaacggtactttgtaaatatcgaaaccatggagatcaccgacagtatcagcgaatctctgatgcagaccgtgatctataactcccggatcctgatgaaggagacggataattatactgcacgggcagagatcatgtgggccggcagtctttcccacaatggacttaccggctgcggaaccggcggtggtgactgggcctgtcaccagctggagcatgaactgggcggcacctacgatgtggctcacggagccggtcttgccgctttgtggggaagctgggcacgttacgtttatgatgcaaatccggaacgctttgcccagtttgcagtcaatatctttgacattccctgcagtaccgacttcaacaaaactgctcttgccggcatagaagccatggaagattatttccgttccatccagatgcctaccagccttcatgagcttggtcttgatcttacagaaaaggagattcatgatctggcgtttaaatgcagctttgaagacacccgtaccatcggtgtgttcaaacagctgaacatgaaagatatggaaaaaatctatcttgctgccagataaatctgtagccataatattgcagatgtttttttgaaaatcagatttttcagaaaaacatctgctttttttattttttccttgcattctctacataaatgtgttaaagtaacaaagtactcgaaagagacatgcccagatagctcagttggtagagcagaggactgaaaatcctcgtgtcgctggttcgattccggctctgggcattattttttactctgatcgcagaatagcctctgctggtcagagtttttttatacaaaaaactgctgcaaatcccttgtggaatctacagcagtctttttctgatcactgaagcaaataaacttctgtataaaacacgcccttctgctctgcttcggagtgtgttgccacatatacatcaatgcaattggtccggatcgctcctccgcagtcctctgcaacataaacctgtccattgatcactactttggaaccgtatgggatctgactcggatccactgcgatcgtacggttggtagtggccgttactcctgtggaagtaattccattcgcccatggtccgcagcagatgctgcacggacaataatgcgtgatccggaatgttcccagtggtttcagtgtcgcgtcagaagatactgataccggcgttccgatctgtacgccagctgcggtacttccggaaccacctgtggaagttacaccatccaccgcatccgcaaaaacgccctccccggaactcttggtaagggatcctgcttttgtattcttttcctgctctgccttggccacttccgtagcctgataaccttccagacagctggtcggaatatagccgacgtgatctgaaccactgtcatctgtgtaaacgatcctgctccagatagcatctaccgtacctgttcttttcaactcatcatcctgaaggacctctcctacaacctctccgtccttcttgccgggataatccaggatatcactgtcctgtgccgctgtaactgtatccgtaaatttatttacgatctccatatcactgagcacgctgtccgaaacataaccgatgatcttgtcctcacctttcttttggaaggtcaccttgctccagccattgtcacagactgcaactctttcaagtttcgttcccaggatcacagaacgcagctctgtaccactgtctcccggattggaccggatttccgtatttttcgctgtaacataaagcgtatcactcttcgccaaaacatttactgtatttcccgccccatcatcgatctgaaactgctgaggtgtttttttctcctttgtatatgtatccagtgttgcttcatatcccagtacctctgctgatacggatgcagggaaaagcatagaagcacataaaataactgccagaagtttttttcgcatgaaatcttgcctcctttcttccggcattctacggtttgtcccgactatcatagcatatcagatcatattttgcaatttcacaggacagtcttcagaaatttttaacaaaaagatcatattttttaactggtcaaatctatccgtaacggatacaatacttatatgaatacaaaacacaagaaaccaacccttactaaaaaacagcgccacaaactccgtgtacagcaggtgcgaaggcagaagatctttctgacatgtctttttctgctgatcgtgggctgtatccttctgcgtttttccaaattttccggcaggcagaaggaaacccatcaaatcaatgcagcctgtgaagcttatcgcgatgaggtttccagcgaagcagcacaatatgatatgtccgactatgtagacctgatcctggctgtgatgatgcaggaaagctccggacagggtaccgatcccatgcagtcctcagaaggagcctacaacaccagatatcctcagcagcccaatggtatcacagatccttcttactctatttcctgtggcatccaggaactgaaatatgctctggaaaaggccgtctgtaccggtccgactgatctttccaaaatccgtctggctctgcaggcatacaatttcggagccgattcctattttgcttatctggaagaaaacggtcagactgtgtggacggcccaaagtgctcaggcctttgctcagatggcaagcggcggcacacaacgtgatgaagatgatccccttcatgatcctgccggtccatgggactatggtgaccaatactatccggatcatgttttgcgctattaccacttagacaataactcataaaccaccgaaatattgtcatatacaagttctatttcagacgtctggaataaactttatatgttgtgtataatttcaaaaaaattccaaaaaacatttgacagaatataaaatctatgctaatatatgtcttgtcgctgagggaaacacttgaaacgataagacatatgcgatagtggcgtagttggtaacgcgcgaccttgccaaggtcgagaccgcgggttcgagccccgtctatcgctcttcagaactctgagtttttcagagttcttttttatttttaaaactatcctttttcgatcaaaaagtcccgggtctgatctcttttttccagaaattcagattcgggactttatattttttatcttttatttcagctgcatatcatggccaaggcatgcatcttttagtggtggaaaaggcggattcctgtaaatgccatcaccattccatacttattacatgtatcgataactgcgtcatcacgtacagatccacccggctctgcaatatattttacaccgctcttatatgcgcgctcgatattatcactgaatgggaagaatgcatcggatcccagtgtcacgccggtaagaccatccagccatgctctcttctcttcttttgtgaacacttccggcttctctgtgaatgtcttttcccatgcaccatctgcaaggacatccatatattcctcaccaatgtaaacatcaatggcattatctctctccgcacgtgtgatcgtgtctttaaacggaagctccagtactttcggacactgacggagataccagttatctgccttctgacctgcaaggcgtgtacaatgtacacgggactgctgtcctgcaccaacgccgatagcctgtccgtccttaacaaagcatacagaattggactgtgtatatttcaggatgatcagagaaaccttcatatctctcttggcttcttccgtaagctctttattctctgttacaatattggagatcagcgcatcatcaattgccagctcctggcggccctgctcaaaggtgactccaaatacctgtttgtgctccaaaggttctggaacatagttttcatcgatctggatcacattgtaattgccttttttcttctgcttcagaatttcaagagcctcctctgtatatcctggtgcgatcacaccatcagaaacctctctcttgatcagcattgcggtatctttgtcgcagacatcagaaagagaaataaaatcaccaaatgatgacatacgatctgcacctcttgctcttgcatacgcacatgcaagcggggaaaaattcttccagtccatatcacctacccagtagatctttgccagtgtctcattcagcggaagtccgatggaagcacctgccggagatacatgcttaaatgaagttgctgccggaagtccggttgctttcttaaggtcacgtaccagctgccagccattaaaggcatccaggaagttgatgtatcctggtcttccggagagtacctggatcggaagctcacttccatctgccatatagatctttgatggtttctgatttgggttacatccgtattttaactgtaattctttcatgaaaaagctcctccgttctctgtgatatccctattttcttatttattcttgtttacgatcctggattcatattttcctgtctcaatgtcaataaaacgaacaaagagagaaactttattatcctggttcaggctcttccagaggagatccgtaaactcatcaatatcgcttgggatctctaccagcttcggctctccctcgaaacttggaagtggatttccatcgcatttataagtatggataaaacgtccctgtcctgccgccgcattctcataggcaaatgtataacgaagacaggaatccggatttccgttattgctctttaaaatagacatcgcataattgaatttaccgtcttcaacatgaagaacacctgaaatacgaggtgtatagttcggcgcatccggctcaaactctctgctgcggagagactgttcaaaggtgagctgtctgtccattccctcatagatcgtatctgtctgatcaccgtttgttacgatggtcttatttccaaggacacgtaccggtgcataaatgatcaggctcgggtctgtaagcttggacggatcaaaagcctgtgtacggattccttccccatcctcaacaaaaatacggtttctgctgttctcgcttcttcccataataaaatatgcagtaactgcatgtttcccgtcagcggaacgtccgatcacaattcctcttcccggataggaattttctttcagttctttttcaagtgaaaatgtcgtcatttttcacagtcctccttgtctaatgtaaggcccggggcttatcccaggatatgaacggtaacaaaaaaccgcctggacaccccttatcaggctgcccaggcggtcggcttctcacttcactgcactccctgtaggtaatcctactttccgccagtcatgcagcttctgctgttatactacaatacttcttcttaattttcaagcccctattttcagaaattatttttccagacttcttgttgctcacaaaataaacaataacactttatttcccctgtaatgcataatctgtctggatctgtgctgcaatgtctgatttcatctggatccatgcatcgggattttccacgtaatacttcggacagtctttacctgtgacatcataatgacggatcacctgatccgaagtcagtccaaagcgtgtacaaagccacgctgtcagctttaccgccgaatcataggttgctgtattaaactgccctgtttcatccggatggcagcattcaatggatatggtatctacatttctggaatttgtggcataggatatttctgaagtgggaatacattgtaccacttctccctccaaacctatcacaaaatgactgctgactttgttgtcctgcgttatcgcaagattttcaaaataattccggttggatacggcagtagatcccggattggccgtataatgaatggctatataatttacctgttccatagaaatctgtggtctggaataggaattcggtgtcagaagctccacatcaataaaaggtgctccttctgcctgccattgttccggtccgccatttccgctggcattcccggatatttcttcctgtccggactgagtttcactctgttccatgcgcatctcaaaaaatgcgtatcctaacgcacacgcagcaaaagcaacgatcacaatgatacatatcaacacaatcctctgcaggatcttgatcgggttcttttttctcaaagacttcttttttcttctggaagacccggaggaagttttctttacggaaacaggccgcccgctatgggacggcctgggtgactttttaccggtcttacctttttttcctttattattcatctacactgtagtttggagcctcttttgtgatatggatgtcatgtggatgtgactccttgagagatgcagcggagatcttaatgaatctgcctgttgttttcagcttctcaatgttctctgctccgcagtaacccataccggatcttaaaccgccaattaactggaatacggtatcctcaacgtgtcctttgtatgcaacacgtccttcaacaccttctggaacaagcttcttggcgttctcctggaagtaacgatccttgctgccgttctccatagctgcaatagatcccattccacggtatactttatattttcttccctgatagagctcgaatgttcccgggctctcatcgcatccagcaaacatgctgcccatcatgcagacattggcgcctgccgcgatagccttggtgatgtctccggaatacttgattccaccatctgcgatgatcgggattccgtagctgttggctacttcatagcaatccataacagcagtaacctgcggtacaccgatacctgcaacaacacgtgtggtacagatagatccaggtccgataccaactttaactgcatctacaccagcttcgatcagtgccttggtagctgctcctgttgcaacgttacctgcgataacctgaagttccggatatgcagccttgatctcgcggactgcttttaagatattctcagaatgaccatgtgcggaatcaattacgattacatccacattcgctttcacaagtgcatctacacgtgcaagtacattggctgtgataccaactgccgcaccacagagaagacgtccctgtgcatccttggctgcaagcggatatttgatctgtttctcgatatccttgatggtaatgagtccttttaaattaaagtcgtcatctacaatgggtaatttctccttacgggatttcgcaaggatcttcttggcatcctcaagtgtgattccttccttggctgtgatcagtccttcagaagtcatgcactccttgatctttctgctgaaatctgtctcaaatttaagatcacggtttgtgataatacctacaagctttctgccttctgtgatcggaacaccggaaatacggtatttcgccatcagatcattggcatctttcagtgtatgctccggtgaaagataaaatggatctgtaataacaccgttctcagaacgtttaaccttatcaacctcttctgcctgtgcttcgatggacatattcttgtggatgataccgataccaccctgtctggccatggcaattgccattctgtgctctgtaactgtgtccattcccgcactcatcatggggatattcagctttactttcttggttaaatacgttgaaacatctacctgattcggaatcactttagaataagccggaaccagaaggacgtcatcaaacgtaatgccttcaccaataatagtacccattgcatttcctcccttgtgtaagatattttaaatttgtgaactagtgtaacaaaaaacaagattcatgtcaatccaaaaaaactttacttggtgcagaatttttcatggtatttgcaagtgcgtcatccagttccaggatcactttgcaggtttctccactgtctcttatgatcattgcatagcgtttatgatcctcaattcctgatgaaaaatcatactctttcatcttctgattgccattataatagtccattctgtgggactttaatggtgccacaaggtctgcctccgcaagctggagcgatttcactcttttcctttttgattttgacatgatcatatcaatgtccagttctccgttaacaaacagatactcgtactccagatctgtcttcggtattacaaaataacatgcaataccaagtgcaatagccggtaccagcaaaagtacattcagcacaaggcctcccaggaccatgatcaccgtcagcgctatcagaccgtatttcacaaccagatctttcgctgtctgcttcttttttaccagaagctctgaatataagtcactcatttgtttcttcctttcgtaatttactgactttttgattataacacaaaaagagagccgcgtctatggcgcaggccctctcattttgtgaattaattatttcacctgctcagctgataattacatcattcccattcccgggtttgcagccggagccggagtatcttctttgattgtggaaactacagcctctgttgtaaggagtgtagatgcaacacttgtagcattctgaagagcacttcttgtaaccttagccggatcaaggattccgttctcaaccatgtttacgtatttctcattgagagcatcgaagcctgtaccgatctcagactctcttactttgttgataataacagcgccttccagtcctgcgtttgcagcgatgtggaacagcggagcctcaagagctttcaggatcacataagcacctgtcttctcatctccttcaagtgttgttgcaagttttgcaacctctttggaagcatggatgtaagcagatccgccacctgcgatgataccttcctcaacagctgctcttgttgctgcaagagcatcctcaagacgaagttttgcttctttcatctctgtctcagtagcagcacctacacggataacagctacgccgccagccagttttgcaagtctctcctgaagtttctctttatcaaactcggattttgtctcctcgatctgcgcacggatctgtgcaacacgttttgcaatggcatctttgtcaccgagaccatcaacgataactgtgttctcttttgcaactttaacagattttgcacgtccaagctgctccatcttagcttctttcaggtcaagaccaagctcatcggagatcacctgtccgcctgtcaggatcgcgatatcctgaagcatctcttttcttctgtcaccatagccaggagcttttacagctactacctggaaggttcctctcagtttgttaacgatcagggttgtgagagcctcaccctcaacatcttctgcaatgatgagaagctttgcaccagcctgaacaacctgctcaagaagcggaaggatctcctggatgttgctgatcttcttatctgtgatcagaatatacggatcatcaagagttgcctccatcttctccatatctgtagacatgtatgcggaaatatatccacggtcaaactgcataccttcaacaaggtcaagctctgtatgcatggtcttggactcctcaacagtgataacaccatccttggaaaccttctccatagcgtctgcaaccagctgtccaacctgctcatcacttgcagagattgcggctacattagcgatctgagcttttccgttgattgcctggctcatgttcttgattgcttctactgcaacatctgttgcttttttcattccttttctgaggatgatcgggttcgctcctgctgccaggttcttcattccctcatgtaccattgcctgtgcaagtacggtcgctgttgtagtaccatcaccagctacatcgtttgtcttggatgcaacctctttgatgatctgagcacccatattctcgaatccgtcctcaagctcgatctcttttgcaatggaaacaccatcgtttgtgataagcggagcaccgaaagatttgtcaagtactacatttcttcctttcggtccaagtgttactcttactgtatctgcaagtttatttacaccagcttcaagtgctgctcttgcttctgcgccgtatttgatctcttttgccatgataaaatgacctcctatttatattgatatacgataagatgtttatattatttaatgattgccaggatatcttcctgctttacaataatataatcagttccatccatctttacttctgttcctgcatatttggaatagataacagtatttccgacttctacttccatttttacttctttcccatttacaactccgccaggtccaactgcaataacctctgcctgctgtggtttctcctgtgcctgtcccggaagcacgattccggatgctgttgtctcttctgcttcaacctgttttaatactactctgtcgcctaaaggtactaacttcatgatctatgttcctcctttataagttccatcttcgtctgctagcactcactttatacgagtgctaatcactatggctatattagtgaatttcacatattttcgcaacccttttaagatatggtttttctatattattctgattttatctcttttatactcttgttttctcttgttttctcaatttcattatttattttgattttatgaaacagacaaaaaagagactcccacgctagcgggaagtctcttttgtcacgttctttatcttatatcaagcatctgacagtgctgatcacattatgccttcttgcttctctgtgcttttatctcctcaagctcatcaaagatcacttcattaagaactttaatgtaagttcccttcataccggatgaacgggattcgatcacacctgcactctcgaatttacgcagtgcatttacgatcacggatctggtgatacctacacggtcagcgatcttgctggcaaccaggataccctcatccccatccagctcatcaaaaatatggatgatcgcctcaagttctgagaaggacagtgtactgaatgccgatttaacgatctgctgttttctgtcttcttctgcgttctcgtcatgaaccgcacgcatcatttccaagcctacaactgttgtaccatactcgctgacaataatatcctcaatatcatagggatgatcattgcggtacatgaataacgttcccagtctctcacctgcaatatcgatcggattcacgattccctgataatttccgggtacatgctcaaagccaagtgtctggagattgacattctcctttgtggaaagaacaccaagaaatctctcattcaataatgggtcgatatgtccgccgattttgtcatcgatcagctctgtgatctcatccacacccgggcagatactgactcccagaaccttacctttcttactgagtaccaggatattggaacttaaggtttccatgagcacctggcaaatgtcgttaaacactaccttgcttgagctgctgttatgcagaagcttattgatttttctagttttatctagcaactgaacgctcatttttcctcctttcactttcgtactttgaaagaaatcgtttttctagtctaatattacacgttattctggaaatttacaagacttttttatatttttttatttttaacgggattttctgaaaattggtggaaaagcatttattcaatcaatcttcatcttttggtttttgttccacatatccgcaggtttcctggctgcaaaccagcttatttcccttttcgagcatataattaccacatttcggacatttctttgcagaaggtttctgccaggacataaaatcacattccggattattctcacatccgtaatattttctgccttttttcgtttttttcatgacaatttcgccgccgcacttcggacatgcaacaccgatcttctcataatatggttttgtattacgacagtccggaaatccggggcatgcaagaaatcttccatgaggaccgtacttgatcaccatgttgcggccacagttgtcacagatcacatccgtaacctcatcctgtatatcaactttctcaagctctttctcagcctcatccacatcatgcttcagatccggatagaagttacgtacaaccgttttccactgtacggtacctgcttccacgcagtccaaaagtccctccatagttgctgtaaagtttacatccacaatacttggaaaagcctgtttcataatattattaacaacctctccaagctctgtgacgtaaagatttttctgttccttggatacatagcgtctgctgatgatcgttgtgatggtcggcgcatacgtacttggacgtccgattccaagctcttccatagtctttacaagtgaagcctctgtgtaatgtgccggcggctgtgtaaaatgctgctccggcttcagttctttcagcttcagctccatacccttttccagactttgacttaaaacattgccctttttgtcatcgccctcttctgtgtacacagacataaagccatcaaaggcaaccttggatgctgcaaccgtgaacacatactcacctgctccgatcttgacagacgtggtctcataacgtgccggtgccattctgctcgccgcaaaacgtctccagatcagctgatataaacggaactgatccctggtcagggattccttcaccagaactggtgtcctcgcaatatctgtaggacggatcgcctcatgagcatcctgtatcttctgtccgtttttgatcgccttctctgtctgagaaacataatccaaaccatactgctcagaaatataagttcttgctgctgcatctgcttcctctgaaattcgagtagaatctgtacgcagataggagatcagacctaccgtaccactgccttttacatccacaccttcatataactgctgtgccaggcgcatagtcttctgcgtagaaaaattcagtgtcttggcagcttcctgctgcagagtacttgtggtaaacggaaggggagcgtttttgatcctctcacccttttttacttctgtgatctcatatttacagtcttccagacttttcaggatctcatccatttcctgccggtttctgatcggaagttttttatctgttccatagaacttggctgtcaacggtttcttctcaccctttacctgaaattcaccctccaggctccagtattcttcaggaatgaatgcattgatctcatcttctctgtcacagatgatacgcagtgccacagactgtacacggcctgcacttaagcctctttttaccttggcccagagcagcggactgatggtataacctaccatacgatccagcatacgcctggcctgctgtgcatctaccagattcatgtccagttccctggcctgcttgatggacgccttaactgctgtttttgttacttcattaaatgtgatcctgtgcatctttgcagtatctgtcttcaaagcctgcatcagatgccaggaaattgcttctccctcacggtcagggtcagttgcaagatagatcttatctgctttttttgcttctttacgaagttttgcaagaagctcaccctttccccgtattgtaatatacttcggttcaaaatcattgtccacgtcaataccaaactggctcttgggaaaatccctcacatgaccgttggacgcttctactgtataatttgcccccagaaatttctttactgtcttcattttagcaggtgactctactatcaccagatttttggccattttacctctcctaatctcattctgccttcctgtccggcttaaaaactcctgctaaatctccgggcaaaaaagcatttattcaagtctgatataatactgtctcccggtttccttcacaagccccatcaaaataagctgtcccaggatcccggctgtttttcccggtgaaaaaccggtttttctgataatatgatccagattttttggtcgtaaatcgagacaactatacaccaaatccaaatccgttgcaagtcctaacttgcttttttcagacaaatttgtcttttttttcacagataatccccactcatccagaagtatttccggagagtatgcaattcctgctccgtcgtagatcagcttgtgacagcctctgctcagcgcatcatttaccgctcctggaatggcgtataccatcttcccctgttccagtgcacaggcagctgtgatcagtgatccgctcttttcttttgcttccaccacaagcaccagatctgccagtccgctgatgatccggttccttgccggaaaataatatgccctgcctttggtacctggttcatattcgctgatgatccctccgtttttttcggggatcctccggtaaatacctctgctggatgaaggataacagatgtccacaccatttcccagcacggcaaaggtcggggtaccaccttccagagcacccttgtggccctcagcatcaatgccggccgccataccgctgatcacctgtacaccatgttcgcttaagaattttccgtaattaaaggcctgtatccgtccgtaaggactgcacagccttgctcccacgatcgccgctgtaggtttggcatcatccggaaagcttccaatgtaatataattgttttggcataccgggaagttccttaagtcttgccggataaacactactgtccttccgggcacaccggatccttgtttgctgtatttcttccatataaaataccttccttttttctgttttatgaccagtatttcttgtcatatgcccggtaagccaacgcctcgcagatatgttcttcctttatcttttcggaagattccatatccgcgatggtcctggccgttttcaggatcttatgatatgctctggtactgaattgaaactgctcatatgcctgctccagaagtttgtctgcccctcccgtcattacacagtatttctccagttttcttccgtcaagctccccattgaagcaaaatttttcctttttgtaacgttctctctggatctcctgtactgcttccaccctctttcttatttgagcagaggattcccctgcaattttctttttcatttttgaaaaactcactgccggaacttccgtgcagatatcaatacgctccaggagaggctggctgatctttccaagataatgcgtgatctcccctgatgtacagcgacatctgttcatatccgggtaaaatccgcagggacagggattcatcgctgccgccagcataaaactggccggaaaaatataagttccggcagctctggacagatggatctccttatcttccagcggctgacgcaggatctccaggctttttctggaaaattccggcatctcatccagaaaaagcacacctctgtgtgcaagagtgatctcccccggtcccggtatcctgccgccacctgccagagcctgaggggaactggtatgatgcggacttcgaaaaggcctctgccggatcagcggatctttttccgtgagaagtcctgccacactgtataccttggtgatttccaggctttcctcaaatgtcatctccggcataatagtaggcagacgtcttgccagcatggtctttccggatcctggcggtccgataaaaagaatattatgaaaaccgctcactgcgatctcggccgcgcgccgggctccttcctgcccgcagatgtccgcaaaatcaacatttggtttttccggtttattttctgttttttctttttcctgatactcatttgtataagtgtttgggtctctcagacatcggatcatgtcattcagactttttactccaaacaccggcatatccttcaccagattcccctcccggatattttcctccggaataacgcaaaagcgtaagcccatctctcttgcgcggatcacccgtggcaaaactccggcaaccccatggatctctccattcagactgatctctcctacgatcataactccttccagaagatccggttccagaattccggcagccgcaagtactgcagccgccacaggcaggtcaaaaccggctccttcctttttcatatcggcaggtgcaaaatttacagttactttttttggtggcagacaaagtcggttgttcttaaatgcagtccggactctttcctgggcctctctcacctgggcagagggaaatcctaccatagcaaaagaaggcagaccatcactgacatctgcctcaacctggatctcacgtacttccattccgtagatcgctgctgataaaacactcgcaaacaaatacattcctttctgcgaaaaaaacggatcccgatcttccatcttttcgtcttttcaggtcaggcggatattcgaaatccgcattggttaaaaacaagggaattttcagatagacattttctgaattttagaagataataaatttagtatagtccattttgctctcttttgcaagggtgcatttcgttctgttttatactttcaatagaaagaagaggtgagcacaatgaaatttcagcgtattcaggatttacgtacagacgcggatctgtcccagagagaattaagtgagattcttcatatcagtcagcgttcttattcccattatgaaacgggatcccgtaatattcctatcgaaatgcttatccggctggcaaattattacgacaccagcatcgattatctcgtcggccgcacagaccgcaaaaaaatgatcaaataaagagatccccggaaatgtggaacagtttcgggaattcctgtatcgggattccctgattgccaaaatccggggattctttattttaccgtgttttattttttttgatcattctgtataataggtttcttcttctccgtagggaatctcatattcttctgtattttcatcagaagaatcttcactgctttcgctgtaggattcctgttcataggaactttcgttgctttcattataggaagcatcttcttcggaattttcggatacttccagggatggctcctgccgggtcataatagactctgttttcggataggtcagagatccatctccccgttcatatgtttttaccttcacataaagctcaccacttttatcgaaaacaaactctccttttgccttattcccttcggaatccttaaaacggaactgtgtggcatttcctgctacctctgcagtcacatctgcttctgcggtcatggaaggatcttttccattcactctcttataggtaaaggaaacagatttcagactgatatcataaatatcgatcgttgtcagcccgtcttcgctgtaccagattccctgataattttccggttcaaatgccggaaggattgtcgggaccggtgtcaatgacggtgtcggcgtcgctgtcggaaccggtgttgctgttgctgccggagttgctgtcacctccggaatactgtccaatgcagccaatgcggcctctcttcgttgttctttttccactttatccctgtgggaaacatacagcatccctcccagtcctgccagaataaacagaatgatcaacaggatcagaactgctctcagccgtttttttcttcttttgttttttctcatctgcattacctctgtttactatagcatacaggaaacccttcttgtatttctcaattctgcttattttttctctttgatgataccttttctgtaaacttccagaagctggatcagctcactgatcctttccttcagagcagttccggtatcggtatcaccgaccagagtacgtttgttattgtagtgaactgccaccctgttggaaacaatatcctgctccttggctaccgcttcttccgcagaagtaaaaggctcatgagcagacaggatcagcccgtaggaattataaaccagtgtataaccggcaatccccgtaaccttctgatatggtctggaaaaaccgccgtcgatcacaagaactttgccattgcattttacaggactctctccctcactctggtgaaccggcacatgcccgttgatgatgtgacctttttccggatccagttcgaattcacggagcagatcatctacaacatcctcattttccagaagatgatagtaggcatttttagtttctttatgtgtttccttatctttaataaaataacgctcaaaggtggtcatcttgtcttttccgaacagcggtgaattcggagctgcccagatataccacataatatctctgcctttacgcttttcatcctcatttacagagaaaaacgcccggcgcacataagtctcaagaacatcgtacaattcttttcctttgtaggtttttccataaatctggacttctttcagacttccatcctcattaagcggaatacttccatggaacagaagatttccattataagttttataaaggcctcccttgtccagaagaagccggacatgattctgcagtttctcgcagtttcggaacgcggaatccaagcgttccattacatccttttcctctgtagtaagttcatatggctttttccagtcaatagtaggaaaatatgtatcggtcagcggatattcttttccgtccggaagtgtgatcattccctttttcggatcgatcctatgaagcaaacaacgattttccatatggaattctttgtgccggcggatcagctgcccctccagcttaaactggataatggcaatagccttgtgcattttccgtccaagctcttcttccagaatactatagttattggcatctcccttcatctcaaaagcagtacatggatcatccttataagcctccattgcaaaggttgccaggggcatgagattgatcccatatccatcctcaagaatatccatatttcggtaacggatgctgttccggatcaccgttgcaatgcaggctttctgtcctgtagcagctcccatccagaccacatcatgatttccccactggatatccagcgaatgatatttcatcaaacgatccatgatgaaatgcgggcccggacctctgtcataaatatctcccagcacatgaagatgatccacaacaagacgctggatcagttctgccagggcaatgataaaattctctgcccggccgatctcaatgatcgtattgacgatggcatcgtaatatgcttctttgtccagaacttccgctttctctgtgatcagctcctcgatcacatatgcatagtctgcaggaagtgccttacggaccttggaacgggtatatttggatgccgttgtcttgcatacttcgatcagacgataaagtgtgatcttgtaccagttctccatgtcttcttcctgtttttttacaacctccatcttttccttcggataatagatcagtgtggcaagagaacgtttgtcgctgttgcttaaggtatgtccgaatacatcatcgatcttttttcgtacagcccctgatccattccgaagaacatgggaaaacgcatcgtattctccatgaatgtccgacatgaaatgctcggtacctttcggaaggtttaatatagactgcagattgatgatctctgttgaagcctttgctatagtaggatatagctccgcaagtcgctgcaggtatcttaattcttcttttttcatagtatctggtatcctcctgggagttctcactgccagatcagccttcaggataaacggcagtattttttatttattgtaagcccttccggtatcatatatcaacccgtaaaatcaaacagtgacatctgattggactgcgggatatctccaaaaagatccatatcatccatcagatcgataacggtcttgctgaccttggtacgatcacggaaatcatccttggaaaggaatctgccttttgcggcagcatccacaactgcctctgctgccttatctccaagaccctctatggtatccagagcaggcatcagtttatctccgatgatctggaaccggtgtgcctttgccttataaagatcgatcggcacaaaatcaaaacctctggcgtacatttcctgtacgatcctcatatccttcagtgtatcctgttccttcttggatgcctcatcaccttttttccggatctccgccatataatattccagacgttcttttcccatgcacatcagttcataggaaaaggaagtggcacggatactgaaaaatgctgcataataagccagtggatgaaacactttataccaggcgatacgatacgccatcataacataggctgccgcatgggctttcgggaacatgtacttgatcagcttacaggaccagatataccagtccggaacatcatgctctttcatagtctggatccattcctcacgaaggccctttcccttacggacactctccatgatggtaaacgctagaccactttccactccttttccgatgagatagatcataatatcatctcgcgtacagattgctgtggaaatggtagctgtaccattctggatcaatacctgggcatttccaagccatacatccgtgccgtgggaaagtccagcaatacgtaccaggtcggaaaaatatttcggcttggtatcgatcaacatctgcatggcaaagtctgtaccaaactccgggatcccgaggcatcccagcctgcagccgccgatatcctccgggctgatccccagagcctgcgttcccgcaaacagggacatgacatctctctggtccagcggaactgttcttgcactgatgccggtcagatcctccagcatacggatcatggtcggatcatcgtgtccaagtatatcaagtttcagaagatttccgtcaatggaatggtaatcaaaatgtgtggtgatgatatcactgttcacatcattggccgggtgctgcacaggtgtaaatttctcaatctcctcacccataggcagtacgatgatacctcccggatgctggccagtggtacggcggacaccggtacagcccttcacgatacggttgatctcacagtaacgcttgtgctgcccccgttcctcataatagttcttcacataaccaaatgcggttttttccgcaagggtaccaatggttcccgccttaaaggtctgcccttttccgaagataacctctgtataccggtgagcattggcctgatattcaccggaaaagttcaggtcgatatccggctccttatcacctttaaaaccaaggaatgtctcaaaaggaatatcaaagccttccttgttcatcctggcaccgcatttcggacagatcttatccggcatatcacatcctgccatacccgcgtattttttcacctcaggggaatcaaaatcactgtatttacagtctggattcggacagagataatgaggcggcagagggtttacctccgtgataccggacatggtcgctgccagagaagaacctacagaaccacgggatccaaccagatagccgtcctcattggatttccacacaagcttctgtgcaatgatatacattaccgcataaccattggagataatagaattcagctccctgtccagacggtcctccacgatcttcggcaacggatctccgtacatttcgtgggccttcgtaaaacagatattcttaagatcctgctcggagttctcaatgaccggtggaaatttatccggatggatcggtgatatcttctcgatcatatccgcgatcttattggtattggtgatcaccacctcttccgccttttcacttcccagataggaaaattcctccagcatttcctccgttgtacgaagataaagcggggcctggttatctgcatcagaaaatccgtttcctgccatgatgatccgtcggtaaacctcgtcctgaggatccataaaatgcacatcacaggtggcaaccaccggttttttgaactgttctccaagttttacgatcttccggtttatctcttttaagtcttcctcagaattgatcatatcatgtttttcatccgcaagcataaacgcattgttcccaagaggctggatttccagatagtcataaaaatttaccagtctggcaatctcctgatccggtgcattgcgaagaagtgcctgataaagctctcctgcctcgcaggcacttcccaccagaaggccttccctgtatttttccagcacacttttgggaacccttggtcttctgtgatagtactttaaatgggactggcttaccagcttgtacagattgatccttccggtctcatttcttgcaaaaacaatagcatggtatgtgggcagctttcggatggtatccggtgaaaccgcaccctgcctgttcatctcatccacatcaaaaatatctctttcttccagcatctttacaaaccgcacaaaaatctctgcggtacatgccgcatcatccacagctctgtggtgatgatcaagagaaacacctactgccttggctaccgtatccagtttaaaacggttcagggcaggaagaaggaatctagccataccaacggtatccacataagtaaaatcatccgaaatcccctgccgtttacagttttcaataataaagctcatatcaaagtccgcattatgggccaccatcacgcagccctcacagaattccaggaatttcggcagtacttcctctatcacaggtgcatccaggaccatggaatcattgatgcttgtcagctgctcaatacggaacggaatgggcacttccgggtttacaaaggtggaaaaacgatctgtgatctgtcctttttccacttttaccgcgccaatctcaatgatcctgcaggttagtgctgagaatcccgtagtctcaatatcaaaaacaacaaaatctccatccagacgctgccctttggaattggtgaccatacccttcagatcgtctaccagatacgcttccattccatagagcaccttaaaatcagactcctttggaacacaaccgccccaggcatcaaagcagtgatttgcctccgggaaggactgcaccacgccatgatccgtgatagcgatagccttatgtccccactcataggcacgttttaccaatgcctttgcatcgctgacaccatccatatcgctcatcttggtgtgacagtgaagctccacacgcttctgaggactggtatccattcttgtgctggtaaaattggcgattttcttgatacctgtaatatttccaatagtaagctcactgtcaaaacggtcaatggtggtaactcccttcagcttcaggaatgcgcctttttttacactttccgtcacttccggaacctgctcgttacgcagaaacatcttcacaacaatactgtccgtaaaatcggtcacagggaagatcaggatcgttttctcatttcggatctcacgagcttccacatccataacctgacatcggatgataacctcacccatctcaccggtaatgctctccagcggaatcgtttctccatcaaaatctctgccgtaaaccacatccggattgctgtccctgcggaatccgaagctgccgcggaaatcccccttctgaaccttctgctgttttttgtcaacggatttcttctcgtttgtcttttcgccgctcttatctccagaggttttctttgtctcttccctggctgtatcctcctgcttcggttcgctttcctgatccccgctgagtttggcatgcttcaggacattttccacttcctgtttgatctgaagtgcagcatttttccggtatttactctctttcacttccacaaaatccagttccactttcagatccataccgcagcgttcacagaaaaccttatgaaaatattcaacaagtatttcgcttttctgtctggaaataaccgtatccggaagctccatacgcaaggtatcttttcctgtaaaaatgatttttgatctacggaacagattgtactccagcatgttatagttgcgcagctccatctccatactggaacggtagctttccagaaagttctccggtgtatactgctcggaaagatgaaatttttccacaactgttacagtcatgggaatccccggaaagcactgccgttcgatctcatcctccagcgcaaaaatattcttcttgtgtatccagcggctgctttcgatataaaccctcaaatgagttcttccggggttcatggaaacctttgtcacaaataccatgtccagaagttcttccagctctttcttcactttaagatgcggaaatacatcaaaaaaatctttctccattatgactcctgctcattccaggtaagaagttcctgacgaagtgtatccaaaagatccgtttccggtactttttttacaacctctccatgccggatcagaagaccaacaccatcgcctcctgcaattccgagatctgcttccttcgcctctcccggtccatttaccacacagcccataaccgcaaccttgatatcaagaggaatatcctgtaccatggtctctacctggtttgcaaggccgatcagatcgatttttgttcttccgcaggtcggacaggaaacaacctccacgcctcctttgcgaagtcccagcgttttcaggatccttttggctgatttcacttcttccagcggtgcgcctgtcagagaaacacggatggtatctccgattccctgatacaggatgatcccaagtccgatagctgatttgatatttcccgaatacagagttcctgcttctgtaattcccacatgaagaggatactgtgttttttctgcgatcagttcatgggctctggcgcacatgagaacatcagaagatttgatgctgatcacaagattgtcatatcccatctcttcaatgatgtgcaccttatcaagagcactctccacaagtccttcggctgtaacaccgtgatatttttctaccagttctttttcaagggaaccgctgtttactcctacacgaatagggatattccgttcctttgctgtatccacaactgcctggatcctctctttggaaccgatatttcccggattgatacggatcttgtccgcaccgttctccatggctgcaatggcaaggcgataatcaaaatggatgtccgcaaccagcggaatatggatctgttttttgatctgggataaagccttcgcagcttccatagtaggaactgcgcagcggataatatcacagcctgctttttccagtgaaaggatctgcgcaaccgttgcttctacatcttcagttttcgtattggtcatggactggataaggatcggatttcctcctccgataacacgatttccaatttttattacttttgtatgatctctgtacataaaaatctcctttatgaatcctgaaaggcaggtgtcttcaaacgccctgcctttcctttccgaactatctttttactcttactcctaacgtcggatctccagcagctttgttttcagttcgttttccatacgtctcatatctgcctctgctgcctgacgtttttcacggccttcctgctggatcttcatcacatcatccagtgtctggatcagttcctgattggtttttttcagagtttcaatatctacaataccacgctgggattcctttgcagtttccacagatgccaggtgaagcgtttccgcatttttcttcagaagttcattggtaaaatccgtaacctgccgttgtgcctgtgcggcttctgtggagtgcgcgatccctagagccagcaccatctggcttttccagagaggaatggtatttacaatggttgtctggatcttctcgatcatcatcgtatcattgttctggatcatgcggatctgcggtgcagtctgcatagaaatggttctggtaagctccagatcatgaagctttttctcaaagcggtcacatttgctttccagatcattggcagcctgtgcatcttccggaagtccgcttgccgctgccttctgatgcaattcgttgagcttgccttctctgacttccctaagcttctttttacctgcaagaatgtacatggaaagttctttaaagtatgcaaggttctgctcatacattttatccagcacggcagaatctttcatcagacgcatctggtgctgctccagagcttccgtaatcttcgtcacatttccctcggcctttgtgtaacggtttttcagagtttccaccttcgctgtctgttttttgaaaaagccgaaaaatcccttttcctctgtggcatcaaaatccttcaattctcctaccacatttgcaagaagctctcctgcctccccaagatcctgtgtcttcacatttaccagcgctgcatcagaaaaatctgccatcttcttctgagtgccggctccgtactgcaggatctggtttgtattttcaatatcgatctttgctgcaaaatcttctacgattttctgttcctgtggagataacaccggttcctctactgcaggctcctggggtttctccggttctttttttgcaatttcttctttttcttccgtgagatccggttccaaagtcagcaccggtgcttctacctcaaagtctttaaattcttctcccataagcattctccttgatcagctgtaccttccggcagatgtctgtattccagcttctgatctgctcgttgtacttatttcatttccgcattctgtttcattttttcgaaatcatcctctgtcagcccttcctgtgccagaactgtatgcagcacagaaatatcggtggatacatcccatgcgatatcccggaatatggaatccagaagtttctcaaaagcaatattcagtgtatcaatagtttcttcaatttctttcttggaagccgtgatattctcgccctgtacaggctgtccatccatatcctcataagcatccagaagcttcacagtcatgggcagatagtaatccatcattttcttaagatccggaatcacctccggatgctctcctgcacgctcaaaaattttctgaacgatcatttccatcctggaaatctttgcggaaatttcttccccgggaatggcgtcattgctctcacggatctttaccagaaattcatttccttttctcaggacttcctgggcttccggactcatgttctcctccagctgaaccttaggatctgcttcctgtttacgaagctccagctgcttctgtgtttccagatactgctgataggtctcattactggtgatcagacaggttccctgctcatccacatgaccttccagaaaccagcccttctggatcattctgctgatatctttttttacaaatttctcgttctttcctgctgcctgggcaagcttctgaaaattacagtaggtgtggtctcccagcgcacggatatatttctggaaacgtcccagtcttccgagacggcttgttcctgctccaagaagagcaccgccacctgctgcgcctgcacacatcactccaagcacacctgctgcaagtgcaccgctgtgtccaatgcccatccagatcagaagcaccatggctccaagccccatgccacttaaaagtatcccaccggaaactgccatcatcatgcctttgagattttcaccggtagtctttccgtagagcagttccgactgtttccttgcagcctgctgctttgcttttctgcttcttccgtaataagggctctggtatgtatagcttttcttacggaattccggatcagcacccggatcaaacacggaattcagcgcattttttagcgcttcgcttccggaatcaatggccttatttactgtctggttgatcgtatggcttaattcgtgatagctgtttgaattcactgcattatctacaatatcctgaatcttttttccaaggtcttcaaattcgtgattgtccatttttccctccagtccatagataatttttattatatcgaaatcatattaaaattacaagcaaatgaaaaaaaggaacaaaaaactattgaagtcatcacttaaaagttttacaatggtaaaaagtaaaaattgtaaacggaggaatcgttatggaaaaaaagaacatcgactggtccagcatcggattcgcttacatgccaaccgactacagatatgtgtctaattttaaagatggaaaatgggatgagggtactttaagcacagaccctaatatcgtactcaacgagtgtgctggtgtgcttcagtattctcagagtgtattcgagggtctgaaggcatacacaacagaagacggacatatcgttactttccgtcctgacctgaacgcagagcgtatcgctgcatctgcggcaagacttgaaatgccggtattcccgaaggaaagatttatcgacgctgttgagcaggttgttaaggcaaatgctgcatgggttccgccatatggttccggcgcaacactttatcttcgcccgtacatgtttggttccaacgccgtgatcggtgttaaaccggctgacgaatatcagttccgtatccttacaacaccggttggtccgtactttaaaggcggcgccaaaccgatcacgatccgtgtcagcgactatgaccgtgccgcaccttgcggaaccggtaacatcaaggctggcctgaactacgcaatgagccttcatgctatcgtagatgctcacaaacagggctttgatgagaacatgtaccttgatcccaagactcgtacaaaagttgaggagacaggcggagcaaacttcatcttcgttactaaagacggcaaggttgtaacaccgaagtctgacagcatccttccttccatcacacgtcgttctctgatctacgttgcaaaggagtaccttggactggaagctgaagagcgtgaggtctacttcgatgaggttaaagattttgcagagtgtggtctttgcggtactgctgcagttatctctcctgtcggaaagatcaatgatcacggcaaggaaatctgcttcccaagcggaatggagaagatgggaccggttatccagaagctgtacgacacactgaccggtatccagatgggacgcatcgaagcaccgaagggatggatccacgtaatcgagtaattaccggattttcgtcattatacataacattaagtacaaaaaacagaccgccgtatttttttcggtggtctgtttttttattatttcttcattgtttttctgtacaaagcaggcattctcattctgctttatgatctgtgctcacattacctatcttttctctcgtattttacaaacgcatattccagatcaaagtatgtctgttcttcactctccgctgtgatctcccagtccgggtcctcatccaggtttggaaaatacgcatccgcttcatatgcaaaatcgatttttgtcacatgagctgtatcacagtacgggagcatctgtttgtaaatactgtctccgccgatacagtacacatcctctgccggatatttctccacttccttcagtgcttcctcgatgctgtgaacgatcaccgcaccttttacctgataatccctgttgccggtgatcacaatgttggttctgtttttcagaggaagtccgtttggaaaagactccagtgtttttcttcccataacaaccacttttcctgtagtttcctcacggaacatcttcatatctgccggaatacttaccagaagttcattatttcttccgattccccagtttttatctgctgcaacaataatattcattctttcttcctttctttatgcaattatactgcaatgggaatatttttgatctgtggccatgtctcataattctccacgatcagatcatcggtggtgaatttataaaaatcctttatctccggattcagttttactgtcggtgcaggatacggttttctggagatcagttctttaattaccggaatatggcgatcataaatatggcagtctgcgatcacatgaacaagctctccggcttccatatcgcaggcctgtgcgatcatcatgagaagaagagaatactgacacacattccagttgtttgcagccaggatatcctgcgatctctggttcagcaccgcattaaggaccagcttgtcttttccgggttccttggttacattgaaagtcatggaataggcacatgggtaaagattcatctcgtggagatcctgatgtacataaatattggtcatgatccttctgctgtacggattgttcttaagatcaaaaagaactctgtctacctgatccatcattccctctttatactgatgcttcacacctaactgatagccgtaggcttttccgatggagcccttctcatctgcccagctgtcccagatgtgactgtgaagatcatggatattattggatttctgctgccagatccatagaatctcatccatcgcactctttaacgctgtttttcttaaagtcagtgccggaaactccttccggagatcataacggttcacaacaccaaatctcttgatggtataagccggagttccatcctcccacacaggacgtaccttctcaccttctgtgctggttccgttttctatgacatctttgcacatgtcaatgaatatattatctgcaagactcatttgttgatttcctcctgtaattttcttctattcgatcccgggctgcttttttcttaaaaatgcccctgaaatttattttatattctaacacatttcagtccttactgtccacttcccctttaacctcctatcccatttaaccttctctccctgtttttccttttccctgttctttttctgtatttttctggacttttccatgcgggagtgctatattaagagccatgaaaatactgattaccttattaaaacctttttcttttgcacctgcgatcctgatgatgtgcgtgatctactctttttccgcacagaccggagatgtttccggtgccctgagctataagatcagctaccagatcgtagaaaccaaaaacgaaatattagcttccggcaaaagcctggaacagctttcccaggaagctgcagatatcgaattttatgtccgtaaggctgctcacatgacagaatactgcctgttggccatatctatttccttccccctctatgtatacggagttcggggaatctggctgatgctccttgccggatttgtatgtgtgggatttgctggactggatgaataccatcagtcttttgtagaggcccgcggaccttccgtaagggatgtagggatcgacagttgcggagcaatgatcggaattttgctggtacaggcattctgctggtctaccttacatacccccaacagaaaaaaatctcgaaaaaaacgcagaaacgcgcaaagacgcagataactgttttgcgatctgcctgatctaaaaaacggaacatacataaggatttttttgccttatgatgttccgtttttgctattactaatcgtcatatctcagcaggcattttactctcacctgcatccagttttatttttcgtctttctcctccggtgcgtcatccagattttccgcaagatgcgcccgctccgcaattgacatttttttctttgccacggtttccggattttgagaagcttcctctgccgcttttttcgcagcagcttcttccagctcatgtttctgtgcgccagcctttgcaagattacggatcgccatgatcagaagcactgctccgatcacaacaaaaatacctcccgctgccagaaataccacaccggagtcttctgctccgcttatgacactggcacagagacgatatcctgtatacacaagataaccgcctgcaaagatccacagaagactgcttcttgtggaagaatttccctgtccggaattcttttcctcagcagtttcctgctgcagctcttccttattttctcttttctgttcttccatgatgtatttctgtcctttctgatatccttatatttctctatttgtcagatatcttttccctgtcagcttctgttttttccttctcttccgtttcttcttttacaagtcttccataaagctttgtcattttataaatcttctgaataattgtttcattgagctggccttttttcatacgccacttccagttgtcaccaagagttgacggttcattgatccttgcctcatttccaaggcagagataatcctgtaccgggatcacacagcgatctgcaacactggacatcgccgcacgtatcatgctccacactgccgcagtctcatgcttaccctcacagccaatataggccctggcaaaatttcggtcatgctggctcagattgcggaaccatcctcttgttgtctcattgtcatgagtacctgtgtaaacaatgcaattcctttcatatctgtgcgtcagatacggactgtcctcattctcgtcaaaagcaaactgcaataccttcattcccgggaatccggattcttccaccatctcgatcacactgtctgtaaggagaccaagatcctctgcgatcacatccagctttccaagattcttttcaagcgcacggaacagatccattcccggtcccttttcccagtgaccgaactgggcagttttatctccgtacggaatggaataatactcatcaaagcctctgaaatggtcgatccttaccacatcataaagcttcatacaatttgccattcggcgtgtccaccatgcatagcctgttttcttgtgatattcccagtcataaagcggatttccccagagctgccctgtggcggaaaaagcatccggcgggcatccggcaacgccgatcggaatattttccttatcaaactggaacaattccggctgtgcccaggcatccgcactgtcaaacgcaacgtagatcgggatgtctccgatcatctccactcccttagcatttgcataagctttcagtgctgtccactgtttaaaaaagcagaactgctggaaacagtaaaatcccacttcttttgcaagcttctctctttcttcagccaatgcagctttttctctgtttttaagttccgtaggccattcgatccagctgatcccattcaggctgtccttgattgccatatacaggctgtaatcttccagccaggcagcattttcttttacaaacttacggtactcctggtctgtctcacagtcataattttcaaaggcttttctcaaaagccgaaatctggaattataaatcttctcataatccacatagctctcgtttgtaccccagtcacagtcctcgcaatcacttttatccagatatccctcttttacaaaagcctccagatcaataaaatacggatttcccgcaaaggtagaaaaagactggtatggtgaatctccatatccggtaggtccgagaggaaggatctgccagtatttctgtcctgctcttgccagctggtctacaaactcatatgcttcctcagaaaagcatccgatcccatatttcgatggcagactggatactggaagtaaaatcccacttgctctcataatttacgaatcctcctgttttctcagtagttgcgccctctcacagatgtctgcaggagcactcagatttttattatatcactctgtcacagagcgttcaaagtccttttttgcagatatatgtaaatatatcatgataaaccttttccctgtctttctcattcaggatctcgtggcgcattcccggatataattttccccggacatcccggtatcctgcacaacgcatggcacggacagacttcgcaaactgtctcacatttcccatgcagggatcctccgccccactgataaacagcaccggcatttccggctttgtacacttccagtgcttcacatcataggctcttttcatcaggtcaaaaagtgccagatatgcatcatccgtaaaggtaaatccacagtattctgaatccgaataatcctgcacaacctgcggatcagagcagatccaggaaaaacggtttttttcttttttaaagtgcattgcatagcttccaaaagacatcatctcgatcagacccgcactgtgtttaggcccgaaaacagtctttcccgcctttgccagagctactccgaccggacgaaatacattatagctgggtgagccgcagacgatcagcatatccatacagctgtcatgatgcgctgcataggcacgaactgccagagagcccatgctgtgtccgaaaaggatcagcggaatacctgggaaatgatccttgatcaagcagttcaccgtatggatatcctgcagcatggcatccgccccaccaccgtacatatacccaagatcctctttactgcgtacgcttttcccatggccacggtgatcatggatcacacttatatattttcgctctgccatatattccataaaaggaatgtagcgttccttgtactcactcattccgtgaacgatctgtatgatcccacggtatttctcattacgttccaactccggcactactgccagacaggaaatttccaatccgtctgcttttgaaggaaatgaatactgaattgtccgtaacatatatttcacctcaccttttctgctgcataaagcgggcattcgcattccgctttgtcacctgtactcaaccactttttctgtgtcttccagtatatcataacacagggggtttctcaaacagtaaacctatgatataatcgttacggtaacatagggtgatgcttgtttgcccgcaaatgcaaacagatatcctctgacttacccacccgaaaaccagaatgacttattgtaaggaggaataatgaatacagaagacaataatgatttttatgacgatgagctctccagatcattgatctccaatgattttgaaggcgacactccccacagaaagaaaaaaagcaaaaagcctctcgtgatctgtctgatcatccttctgatcgctgccgcagccggcggaaccgcctggtatatgatgcagcgccataaaccggtagaagccacagaagaatttctcacaggcatgcagaacatggattttaccacaatggagaaccttctccagagtcatgatctcagtgctctggatgatgcagatatccgtgattctgcttacacagatttcttcactaccgtcaacaaaaaaatgacctacaagatcaccaaaaacaaatttgacatccagaacggaactgccaggataacggttcacatgaaatatattgacggaaccaatatctatgcagcaactattcaggaatacacccgtaaggttgctgtcgcagcctatgccggaaaggaaatgacacaggatgatatccaggaaatgctcgctgcacttcttgccgaaaatgcttccacagctgatgagaaatacagtgagatcgatattacctatcctctgatcaaaatcggcagcgactggaaaatcgtttctctggatgacaccaccgtcaaggttatgtgcgcaaacttcaaaagcgtaaaagacgaaatatcatcccagcttacggatgacagcacagatagcagttctgccgctgcggaggattcttccaccccaggcagcacggcttctgctgagggcacaagtgcatccattgatattacaactgacaaattctccgtccgtttcaaacagtttgcgatttccaaggactacggcggaaatccctgtctgatgatctactacgactatacaaactccggcgattcccagtccagtgcatttgtagacttcaccctgcaggcttcccagaacggagaagttctggaaggaacttatccggaagccagcgatgatgctgtagataactacatgagcaccattgatcccggaaaaaccgtcactgtatgccaggtatttcttctgaaggatactaccagtgatgtaacgcttcagggcaaagaaactctgaatgtaagcggcggacagacaacctctcagattctgaagctgaagtaagatatcggaatcgcctggcagatatttacgatccaaattcgataaaccggaaatttacattttatcttgcatatgaaaggaaaacggaaatttctccttcatgattttttcatggctggcagaaatttccgtttttctttttctcattcctgtgtatattttttcgattctatgaaaaactatttcctgtataacgaaaggatggtgacttatgtcaaataaatgtctgcagtacttcaccctgaccattgctgtggtcggtgccataaactggggtctgatcggcttctttaattttaatctggtagcattcctgttcggaagcatgagctggctctcccggatcatctacggacttgtaggcttatgtgggctttatcttctgaccttctatactctgatcgatcagggtgaaacaactgaataagctacgcagtaacacataacgcgaaaaatcctctgctgcataaaaataaagcagaggattttttcgcaacaaaaaagaactctgatcatcctcagagttccgaagagcgatagacggggctcgaacccgcggtctcgaccttggcaaggtcgcgcgttaccaactacgccactatcgcacaagcgggtgatgggaatcgaacccacgtatccagcttggaaggctggtgttctaccattgaactacacccgcagttatgaaattataaatcttcatccttcgatgagagcgatagacggggctcgaacccgcggtctcgaccttggcaaggtcgcgcgttaccaactacgccactatcgcataagcgggtgatgggaatcgaacccacgtatccagcttggaaggctggtgttctaccattgaactacacccgcgcatcgtcgcttcggtgattaccgatcgcttgaccgctgcaacgatgattagtatataacatactgttttatttgtcaacaggtttttttattttttttaatttttttatttattggattttttatcaatactcccatacatttgtggcagaaacctgggccttcggtttcttgatcacaagctccggactttttgcactgaccttggtatttgcaggaatggattctgtgataaaggtattaccacctataatcgtattctctcctacaaccgtctcaccaccgagcactgtggaattagaatagatcgttacattatcacgaatcgtcggatgacgttttacattggcaagctgctgtccctttcttgtggaaagcgctcccagtgtcactccctgatacagttttacattatttccgatctctgtagtctcacctacaaccacaccggtaccatgatcgataaagaaatactctccgatggtcgctcccgggttgatatcgattcctgtacggccatgagcatattctgacatcacgcgcgggataaatggaatctcttctttataaagaacatgtgccagacgatacacgtagatagcaaataatcccggatatgaaaaaatgatctcttccttgctcttggctgcggggtcaccatcaaaaccagcctgtacatctgtcagaagcagtctctggatctcaggaagctgctcaaaaaatccacatgcagttctgtctgcatgagctgctgcttcttccggttcctctccgtgataaagaagtgcgatctcgatctgattcttcaatctgtcataaagatcattcagtctgtgtcccacataatactccggaaatacggtagcactggtatccgtactgaaatatcccggaaatacaatagatttcagatctcttactatatcaatgatcaccgaacggttcggcagacgtctaccgctcttcggcataaaaagttcttctgaagcataattctcagtaagacccttcgccactctgagaatcgctgatttcttatcgctcataattccctccatttctgcacatccacttctgtctgtacactttatctcattatcatattatagtctggaagattcgtcaataatacaaaaaagaaaagttttaaaaaagattgacctttctccagataccttatataataataaaggtttgcatccggagatgtacccaagtggctgaagggtccgcactcgaaatgcggtaggtcgggcaaccggcgcgagggttcaaatccctccatctccgcttttctgccgatttatgacaggaagaattttatttatattttattatacaaaaagcactctcatctcttgacaattgtatattttatatgtataattgcaacagtgatgaaaacacaatttaatataggggattggtcaaatggtatgataggggtctccaaaacctttggtgggagttcgattctctcatcccctgctctcaggaacgctgaaaagtcttaattaaggattttcggcgtttttttgtatggcagaaaaagtgaccgcccggcctgtgatattcaacatctgggcgatcacttttcaatattttacttctcactgcattcatatcgtgaaaatctctgcacatatccacatgcgcttatcacttcagtttcttcagattatccggtccaaatccaaatggcaacagttcctttaacgtaaagatatcatatttttctctgctgactgccagtatgatctgaaaggtttccggatcacagaactccatcataacctgtctgcatactccacagggtgctgcatactctgtaggaacaccatccttgccgccaacgatacagattgcctgaaagtctctcatgccttcactgaccgctttgaaaaaagcagttctttccgcacagtttgttggagtataggcagcattttctatgttacacccggtataataggtaccgttttttgcaagaagtaccgcccctacatgaaaatgtgagtatggcgcataggaatagtccatctgtctgatcgccagatcgatcatttcttggatctgtttcttttccatgattttcccacctttcctgaatcagacatgtatatcgttattctgcctttttctgtgcctgttctgcacggatcaattcacggattgcctgtactgcaacctggattgccttatcggtatcatgtaccacaggattatccaaacccagcttttctctttcctgatttgcaagcaccaggaagcaggagcccacacgtacttttaaatggcttgccactataaaaagagcagcggattccatctccgacgcaagacagccgagacgtttccacgcctcccatttattcatcaattcatagctgaccggcttggtttccggctcatgctggccataaaaggaatccttacattgtaccacacctgtgtggaattcacatccttctttctttgctccttccacaagtgcattgatcacttccagatttgccactgccgggaattcaataggtgcatactctttgctggtgccctccatacggatcgcgcccgttgcaacaacaatatcaccactttttacctccggctgcattccaccgcaggttccgatgcgtacaaatgtatcagccccgcaccgataaagctcttccattgcgatagaagcggacggtccgccgattccggtagatgtcacacttaccttcactccgtccagtgttccggtgtatgttacgtattcccggttatctgctaccaaaaccggatcctcaaaatactgtgcgatctttttgcagcgtttcggatctcccggtaaaataacgtaacgtcccacttctccttttgctacctgaatgtgatactgtctgtccgcatcctctgaataatttttcatgtttgtttccccctttctcagctaacagtttccctattccttatgaataaaaaaaagactgcattttcatacaatccagtcctttattcttttattttaaccttgcttcccgtcgattcctgcaaaactgtattgtcttacattacagtcagattttcgtatttgctcagtcaatgtcaaacctcttttgtctttatcccattataacatagattcattttcttcaaaagcttaatataaacatgttccacaaaccacggttctgttgatctcatcaatgcttcttccggtaaaaaccaggctacaccgctgttttcatctgcttttatggaaacagcctcttctgaatctgcctcaaggagatatgttaggttaaagtgcagatggctggatacatattttccttttttcacatggccgtctacagtcagagattccagggaaaaaatctcttctgacaccggacgaacattggaaatccctgcctcttcttttacttctctgacagcaacggacagtaaatccgtctcaccatctgcatgtcctccaagccaggaccaggaattgtatatgttgtgatataccataaggactttcgtccgttctctgtttactacccaggcagaagctgtcatatgggctactgcattttccctgaaaaaagcattctcattatttctgatccagtccaggatcaggattttatctttttcttcctgctcattatatggcttgtatttttctatctgatcgatcagtttctggcgtgttatcattatacactctgtctctttcttaaatatccataaatgtatttttagtcaagcggataaaagcatccgcttcgctacttgctcataaccggataactgcttcacagtttatcagaaggagcttgtaactatcttttttatttaatacccatcctttaaccggacaatattttttaatttttttccattcagatatcgttccatattttccatacagatgttccagatcatatcctggacttcagcgtttccaccgaaactcgggcctgcaatgtgtggagtgataaggacgttttccatattccaaagaggtgatgtctccggcaatggttctgtttcaaatacatccaggaccgctccttttaagtggccttcctccagtactctgatcaggtcttctgttggaatgaggcttcctcttcctacattaaccagaattgcatcttttttcatggaatacagccgttcgtaattcagaaggccttttgtttccggtgttcccgggagacagccaatcacaatatccgctttctgaagctgctgatccagcgctgtcagatcatatacctcatcaaactctttcatctgctgcaaatgctccgggactacagttctttttattccagtcacatgcgtttcaaacgctttcattctatgggcaatatttcttcctatatccccggttcccaggatgagaatgttttttccatatatggtttctgatgatcgattctgtacccagaggtgtttctgtttgttcttccagtagttcggaagttcacggtacagcgcaatgatattcccgatcacatattctgatatgatctttccaaaagcgccggaagcattggttaatgtaactcctgtcggaaatgctttcatttttgtatatttgtccgcaccggcccaggtcagctggatccagcgaagattttctgctttcaggatttcttcttcctctggctctccgatcactacttctgctgctgcgatcgcatcctcagtttctttgccctgaaatgtaaattcgcactgatctctgaattttgttgcaaactgattttgaatttctgcattgcattgtggttttattaaaacttgtattttcttcatgttttttctccgcaaatcatctttatcagctatatcctaccataattaacagccatctgctattattttctgttatttctgccgctgatatctggtcactgccaggatcatgcagacaaaaactaccgcaaacatagcttccagtccaatgcctttccacaccgatacagctgcctcacctgttaggtggctataacttccaagagtctcatttacgttttcataccagtacacaggaagaaactgagacaccttcaggacgtttctgtccataatattcatgggaacaaacacaccacacagaaagcacattccaagagacaggatatttgcgatcccgcttaacatgttgctgttttttacaaaaagaccgatcagataggaaagtgaaagtgccactgccatcattaccagagtgttcagtacatagtatccgaaattttctgaaccgagaaatgtttttccatacataaggatggctccagccataccgattccccataagcccccacccatcacaaacatggccagaagcccttccagactctgtcgtcttgcagagaccgcagatgcctgcattctctttggtatatcgtcttttttgaaagccatcagaacatatcccatcacatagcaaagtaatgcaaaaaacagatatggaatatatcggaaataatagagccatccggacgtaccactgttttcatctgtatccagcatagtgacttctcctctttttttatccaggatcgctgttgccgcttccttctgggaaaaaccggctttcagatatgtccgcattgtattcagacagctctcaagctgctgatccacataatatgccgaataagatccgggcaccttggtcacagaaatactttcgccgtttaccatacagctctcataaaaatcctcaggaatcaccacgatgtactctacatttctgtaaaaaagctcttcctgaagcttctccctgttatcctccagcatggtcacgtgatgcgtaccttcaagccattttaccagtccttctgcaagtggtccgttgtctttatccaccactccgatctttattttttcgctttcatagctggtataagtttccttaccggccgctgcctgaagtgccattgtcactccgaaaaaaatgcccagatacaggaggatcagacctgtattttttttcatgatcctcatatagcctttaaatactgtcataacgttccctcctgaccatgaaaaaggatgccgtcaccagcaccacgcacattaccgccagtgtgatcagatttctatagtatctggtcatatcatcatatacattgatacagtaaaacgcatctgagatcagtgatgcaggattgatccggttcacaaacggaacacttttttccacgatatccttcatatttccgttcatcagtccggcaagaaagctgcttaccatagagattccaagcatgagcccgattctgacgccttcctgcatttttccgaagctgcctataaacattcccatagatacaccgatgagacttccgaaaaaagataccaccagcatttttcccatctgtccctgaaaatccagattgagaatataccggagatacaggatcagaatgatcacgtccacatagcccagagcaaaagatgtcagctggtctgtaaggatcagcttcagcttgtgggtcggcgttacacaccgtctggctgccagaggtgtgatattagcctggatcccgatcgcagagccaaatccgataaagcatccatacaggcaggccatggcgatcagtgcgtaaaagaactgcacatttccgtcaatggtccggccaccaagagagacttcccttaccaagctgtcggaacttaacaaggatttcatggtttccatatccatctgcggattttttttcatgatattggtgatagtcgttctggtgttttcacagctgtcgagaactgtctgaaggatactttcttctattccggttcctgctactgtaagggaaggctcttttcccacataataaatcccttctacttttttatcctgcagtgcttccagcgcttccttttccgacatttcttctgcttttaaaagatccggactgcttttttccacttcatccagataggtcataaaaaacgtatccgcagaagcttccttcaccactgccaccggaaccgtctgaaaatctgcttcattgatatttccgaatgcaaagtaaaaaaaggttccaagcacaagcggaaagaccagcggccagaatacaatgttaaaattccggatcttggaaagaaaactgtatttcagtaaatgtaacatctcccatccctcctaatctcttagctgttttccggtgatctccagaaagacatcatttaatgtaggcagttcggaaaagactcttccaaaagaaatatcctggctttgcagataattaagaagacggatcaggttatgcttcgcatcggtacagcgcacgaccagcacctgttttttatactgcacatcaaacacatgctccagtgtgcggatatcccggagatttttttcttccagggcaatggcttctacggtgatggtctctcctgttttgatcatctgcttcaattcttcctttgttccctgagcgatgactcttccgtgatccatgatggcgatcctggtacagatctgctccacttcttccatgtaatgggatgtgtagataatggtggagccctggtggttcagcgtctggatcccttccaggatcttgtttctgctctgtggatctacagctaccgtcggctcatccataatgatcagtcttggcttgtgggcaatcccgcaggcaatgttcaatcttcgtaaaaggccaccggaaagcttcttcgggtacattttgcggaaatcttcaagacctgtaaattcaatggcatcctccaccagctcttttctccgtttcctgtcccgtatgtaaaggccgcagaaataatcgatattttcctgcactgtcagctcatcaaaaacggctacattctgaagcacgatcccaatctgttccttgagcttatagctgtccggcttcatctcttctccgaatatctttatttcacctctgtcatatttcagaagtgacaagaggcagctgatggccgttgtctttcccgagccgttgggaccaagtaatccgaagatctcaccctcccggatatccagttccagatgattcagtgcggtaagatcaccatatcgttttaccagattttctatgtggaccatactctgtggcatatgttttcctccttttttacagtccgttaagcaggacttttatgtctttttcgcagaaattcatatttcttctatgatgccattatatccttttcttctgtctgctccaagtgttgaatgtcaccacctgcaaatgacaaatgtcatgtctttttcagaaggatagatttttctttgcaggaaaggaaccggtatattataataaaggcacattgatttcagaaatttgtgcagcaaaaggggttctcccggaacaggatacgataattttagccggttatctgcctgactttcggaaaaggctgtaattctgagaaaggagggtatattttttatgcgttattttacagattccatactattgcttttatacagtactttaacatttttttatgtgcctgcagatcaggctcttgtgtttgccctcctttttgcggtgatcctttgctgcattacttatctgtgcagggtatgtaaaacagaatcctgttcacacaattctttgccagtattgaaacccgccggaaatatcattccggttcttgcaggaagctatgtgatctttggattatgttccctgtggttttcggatcttcttctatttttcccgctgctgctgtatcagaccttatctgctgggctttttcctctggcagtggctgcgcttccactttggggatttctggtttttcagatcaatagatttccggcagttctttgtctgcttgggatttttggtttcgttctctcattttttctctggctctatgccggaaaatatcaggctctttaccaggattttcatcaaatccgggatgacagtgaggaacatacgcttcttctttctgaaaaaaacaaggcacttctggaaaaacaggattacgaaatttatgctgctacattgcgcgagcgaaacagaattgccagagagatccatgataatgtgggacatgtactatcccgttctatccttatgactgctgcctgcaaaaccatcaacaaaaatgattctcttgatcctctgcttggaaatctggaagaatccctgaacggtgctatgaacagcatccgttccagtgtacatgatcttcatgacgatgcgatagatctggaagatgccataaaaagacttgtaaaggatttcaccttctgcccggtgaatcttacttatgatatgtccagacatattccaagagaggtgaaatacagtctgatcagtattacaaaggaagggctttccaatgtgatgcggcatagtaatgcggattctgtgaatattcttctgcgggagcatcctgcactttatcaattgtgcattgaggataatgggacaccggaaaatggaattccggatattcaaactggatcagacagcaataaggccaaaaatatttccagtggtatgggactgtccaatatccgtgaccgtgcaaaggcgctgggcggtacggtccagattacgcaggagaacggttttcggatctttgtgacgatcccgaaatctgtttctaattgaatcagacagatatttctcactttgccggaaaccttcctgatttgatcaaagtactttcccggcatattggatccgtctgttttttctgatctgtaaatttattttttataactcataaacaggagattttgacatgaaaattataatcgtagacgacgactgcctggttgcaggagcactaaaaaccattcttgaggcaaacccggatatcgaagtgactgccaccggctctgatggtgaagaagcctgctctctgtacagagagtatcttccggatattcttctgatggatatccgtatgaaaggaatggacggactggaagcttccagaaagatcctgggcgaatttccggaggcaaaaattcttcttctgactactttttccgatgatgaatatattgtaaaagccctccgcctcggcacaaagggttatcttctgaagcaggatcataccagcattcttccggctcttcaggcggtttactccggccagaccgtattcggcacagagatcatatccaaaatccctgaactcctgcagtcttccgacggatttgattatgcttccagaaacattagcgaacgggagctggatatcatccggctgatcgccaacggatacagtaataaggagattgccgcagaactgtttctcagtgagggaacggtacgaaattatctcagttccattctggataaactgcagctgagggatcggactcaagttgctgttttttattatcagcataagtaaaaatctcctgcatccaaattcctgtaaatatttattaatttaatagaatcggaggattcctcacaatgaaccgctatcttactatctatatcccgaaaacagctgttccggcacctgtctcccgctttcttcgcacgcaggcaggtcttacaaaaaagcagatcagccaggcgaagttccgtcccggtggtatccgaaaaaacggacaacagtgccaggtaacggaaaccgcttatcccggggatcagatcatagtatgcctggaagcggacgatgtggattctgcccagctggaatcttcatcctttaccgtctattcgtccaatcacaatttccagttctccgcagacgcaatttcatattctgattccgcagcttcagaatttgcaggttctgatgtcaattctcacatttatcattcactggctgcaacgtcacagattcttcctgagttggcgatcatatacgaagaccaggatatcctcgccataaataaacctgccgggattgtcactcatccttccggttctcactacagtgacagtctcgccaaccaggtggcttcctatttccgttccaaaggagagcctaccaaagtccggtctatcggacgattggataaagaaacctccggtatcctgctctttgccaggaaccagactgctgccgccagattacagaaccagcgtgaagaagggatttcagagaaaacctatctggctgcagtttccggtttcatgcctgtggatgaagatggagcttttcacaggatctccgttccccttgcacctgacccggataactgtctgaaaatggtcgtatccacagatggcacgcttcccggaagcaaacatgcagaaaccctttattctgttctgaaatctaacggccctgacgcagcagctccggcttctcttgtaatgctccgtttgaaaaccggccgtacccatcagatccgtgtacacatggcatctctcgggcatcctcttctgggtgattctctgtactgtttatcggacatatcgaatccgttttcccgggctgcactccacgcatggaagcttaaatttcaacttccattttcaattgatgaatctgcttccgacacccgggcttccatgcatcatgacaaaaatgccaaaaaagaaatctccctggaagcacccctcccggaagatttcaaaaaattctatgaaacgatattctgaagccatacgcctttttttacaaggataaatccaatgacacatttcatcatatccgctgcctggaccattgcgtagatcacaagtacaggcagacctgtaaaacggcttaaggtaaatgcgatcgttacacttaccacccagataaacacactgtcaaacagaaatgtaacgatggtctttccaccggaacgcaaagtaaaatatgttgcatgcaagaatgcattctgcggcatgaaaaatgctgtgagcataataaaatatttcgccagagtacgtgcctcagcattggtattgtaaagccttggaaacagtggtgccattacaaacatcacagctgccacgcaggtacagcagaacacagaaaatgcgatcatcttgttgtccgtatctctggcttccttcatcttacctgcccccagaagctgtcctacaacaatggctaccgaatctccaagtgcgataaatatgatattaaatacattgttgatggtattggaaatatttaatcccgcaaccacgttcagtccacggactgaataacattgtgtcagcatggccactccggctgcccataaagtctcattcagaagcagcggggttcccttaataagtatcttctttgtcaggttcgccggaacctttaatgttgaatacagaccctgtgcaaaaatattcttttctgtatgcttatgtgtccaactcaagacaatgcaggcttccacatatctggagagcactgtggcaacagccgcacctcttactcccatttccgggaatccgaattttccatagatcagaagataattaaatatcagattgatcagcactgccacgatcccggccttcattggaagtacggtctcaccgcattcacgtaaggtacttgcatagacctgcaccatcataaatggcggaagtcccagaagcatgatccataaatactgtttcccataaataagagtatccctgatctcctgtgcggttccgtcaccttttaaatacatgctgatcagtgaaccccctgctgtcagaaacagtataatggtgatcgctgtcagaatcactgccatccacagtttataacgaagtgtctggcggacaccctcatgatccttctgtccgaaatactgtgctgtaaaaattcccgctccggacaccccgccgaaaatacatagattatatacaaagatcagctgattgacgatcgccgctccagacatctgttcggtaccgatacgaccgatcataatattgtccagaagactgacaaaatttgtgatcccgttctgtaccatgatcggtactgcaatagacaggaccatcagataaaacctcttatctcctacgaactttcggaaaaaagaagatttctcttttaccttctccataaattcttcccccttgtttttcgttttccttcatccaaaattctccacaaaaaggagactgcccacctgaaacattcttccctttcgtaagcgttgtagctactaccttactacaaacttcttttattttcaatagtctttataacgataaatctccgctttttttgtatctttttactccaccatacgactctcgtctgcaatatcctgatctttgaacttttgttccagctgtgtcacaatttcagtgtcaaaatttttcaaagtgatctaagccggcagaaaaaagatctggaccgactgaatctggtgctgaattatatttctgagaattacaaacggcctatttctctggatgagatcgcaggtgttgcttatctccagactggatatttctgccgttttttcaagaaaaagatgggggttacatttctggaatatcagaatgaatacagactttcttttatctacaaaaatctgatcaatacgaaagaccccgtgcatgtgatcctagaatgccatgggttcaccaattataagctgtttcgacggatgttccaggagcacttcgggtgcacacctacgaagatgcgggagaatatgcggaaataacagtaccttctcttacaccatccagtcttcccgcaaatacgaaggaaagtaccgcagcaatcactgccatggatacgtcaaaacagatcttggttgttccgaaatttgttttctatgtgaggataaccatataaaaaatgatcctatacacgcataaaaaaacagcgaaatgaattttaacttccatttcgctgtcttgtgttatttcttgttttttattatttttttagtatgtcgttttatgcaacctgatttttgttgttggtaactgtgatcagatgacttttgatcagtaccggacgtactgcattatagatgatcgctaccaaaattacagatacaactgcattgataaaggttgccgccgcactcatttttgcaagtgcctgtgccagttcctgtggctgtcccaaaatgtactgtttgtagaaatatcctacgataggatctgcaattacgttaaatgcaagtcctgcgacagatgcgatcacactccatttgaaaacatattttttatctgtactctcattgatctttgcaaccttgtgtgccacaagacctacgatcagaccgatacagaatttcagtacaaaggttttcggtgcgcctgtgatataaacagggtccatgatatctgcaattcccattccgatagctccggcaagtccgccatatacgccacccagaagcagtgctgcaagtacgcagaaagcatttccgatatgaatggatgttgcgtctccgcccggcaccgggatcttaatctgcagaaatgtgaaggatacataacataaagctgctaataacgcagtttctgcaagtttaactactgtgttgttctgtgtgttcataatgattcccctctcgtttcgttattacctttgttattactttaatgtatgattgtattaatgtaggaatgtaataacttggatgttatagtaccgcttgtttgggtatattacaaggggcaatttttatgtttttttaggggacagtttttatgggtaataaaaaagtggctgtttaagccactctttcatgattgtatattcaaaactacatacatgttttgttgataatcattaatcgtttgttgaatcaattttaacctgcgtaccgattcgccttttttcacgggctcgcagctaaagctgcatcgcctgttttgtaggctactccagcggggatcatctcgcaactccgttgctcgatgtcatttgcttcgcaaatgtccagtctgtaccataaatgattctccacaagcaagcttgttccgccccatttctgttacatcctgcccgcttcctcggctggttggtcaagccctcacccgattagtaacagtcagctccatgtgttaccacacttccacctctgccctatctacctcgtcgtcttcaagggggtttacttcttaaagaatgggatatctcatcttgaggggggcttcacgcttagatgccttcagcgtttatcccttccggacttggctacccggccatggctttggcaagccaaccggtccaccagcggtccgtccatcccggtcctctcgtactaaggacagctcctctcagatatcctgcgcccacgccggatagggaccgaactgtctcacgacgttctgaacccagctcgcgtaccgctttaatgggcgaacagcccaacccttgggacctactacagccccaggatgcgatgagccgacatcgaggtgccaaaccactccgtcgatgtgaactcttgggagtgataagcctgttatccccagggtagcttttatccgttgagcgatggcattcccacttaataccaccggatcactaagccctactttcgtacctgctccacccgtcggtgtcgcagtcaagctcccttctgcctttgcactcttcgaatggtttccgtccattctgagggaacctttgggcgcctccgataccctttcggaggcgaccgccccagtcaaactccccgcctggcattgtcccaccgccggattacggcggctggttagaagcccaatatcacaagggtggtatcccaacagcggctccgcggcaactgacgctaccgtttctcagcctcccacctatcctgtacatgcaacaccggaccccagtgccaaactggagtaaagctccatggggtctttccgtcctggcgcgggtagccagcatcttcactggcacttcaatttcaccggatgtattgccgagacagcgctcaaatcattacgcctttcgtgcgggtcggaacttacccgacaaggaatttcgctaccttaggaccgttatagttacggccgccgtttactggggcttaaattcaaagcttcgacttacgtctaacctctcctcttaaccttccagcaccgggcaggcgtcagcccatatacctcacctttcggtttcgcatagacctgtgtttttgctaaacagttgcttgagcctattctctgcggcctgctctcgcaggcaccccttctccctaagttacggggccattttgccgagttccttggcaatacttcttccgccggccttaggattctctcctcatccacctgtgtcggtttacggtacgggtacaatatgaacgatagcggcttttcttgacgcatggctcacgggcttcgttactaaaattcactccacatcacgtcttcccattgcatggcggattttcctaccatactggtacctcgcttgtaccgggctttccattcccggctcccgctctccttacgtgtccccacagttctgtcatactgcagtacaggaatatcaacctgttgtccatcggctacggctctcgccctcaccttaggtcccgactcacccagggcagatcagctttaccctggaaaccttggatattcggcctagaggattcccacctctatctcgctactcattccggcattctctcttccatgcagtccacagctccttccggtactgcttcttcccgcatgcaatgctcctctaccaatcttttcagattccttagtttcggtggcgcgtttcagccccggacattttcggcgcaggacctctcgaccagtgagctattacgcactctttgaatgtatggctgcttctgagccaacatcctggttgtcttcgaaatcccacatccttttccacttaacgcgcactttgggaccttaactgtaggtctgggctctttcccttttgaccgcccaacttatctcgtgcagtctgactcccggtgatatctacacggcattcggagtttgatattcttcggtaggctttgacgccccctaggaaattcagtgctctacctccgcaagactcacaccgaggctagccctaaagctatttcgaggagaaccagctatctccgggttcgattggaatttctcccctatccacacctcatccccacccttttcaacggatgtgggttcggtcctccactacctcttacggcagcttcaacctggacatggatagatcacccggtttcgggtctactcctactgactctggccctattaagacttggtttccctacggctccacacctgaagtgcttaaccttgccagtaagcgtaactcgccggaccgttctacaaaaagtacgcggtcgtacatataaagtacttccacagcttgtagacacagggtttcaggttctctttcactcccctcccggggtccttttcacctttccttcacagtactatgcgctatcggtcactaagtagtatttagccttagggggtggtcccccttacttcccacaaggttcctcgtgtctcgtggtactccggatcctgctcagtcagctctgctttcacgtacggggctttcaccctctccggccggctttcccaaaaccgttctgttaacttcgctgaatcttaaatgcagtccatgaccccggcatgcacgcacaccggtttaggctcctccgcgttcgctcgccgctacttacggaatcgatgtttctttcttttcctccgggtacttagatgtttcagttccccgggttcccttccatacgttatggattggcgtatggatgcatgaggtctgctcatgcgggtttccccattcagacatctccggatcacgggatatttgctcctccccgaagcttttcgcagcttatcacgtctttcatcggctcttagtgccaaggcatccgccctgtgcccttattgcttgacctttcgcttcatcaccctagcgtaggtgatgcggtctcttgattctcgtgtcttccgatactctcgtatcttccgacatgtgtttgattactctgttcaataacagataaatcgatgtcttcctatctttgcgtttgcattaatttcttaatactttgcgtttaaggatatttgattaacttaatcaaatttcatgtatgcagttttcaaggtacaatgctgactgatgttttatcagccatcagaactcacaaactgtatttgtaaactctgatcactggtaaaaaccagctattataacagtccttcccgactgatttagggttagcaccggacttatcgaaaatcttctggttccactctgtttccaacagagctcactttccagtgcccgttctatttttatcaggcagcttcgcctgtttctttctttttactctggcgcccacctgctctcccacaccgtctccagtgcagtaccatcggccgattgggtcttaaccgtcgtgttcgggatgggaacgggtgtgtcccccaaccgcatcggcaccagaaatatctcagcttgatagctaaacagtaaaacacatcttgtttctctactttttccttagaaaggaggtgatccagccgcaccttccgatacggctaccttgttacgacttcaccccagtcatcggtcccgccttcggcagctccttccttgcggttaggtcactgacttcgggcgttactgactcccatggtgtgacgggcggtgtgtacaagacccgggaacgtattcaccgcggcattctgatccgcgattactagcgattccagcttcgtgtagtcgggttgcagactacagtccgaactgggacgttatttttgggatttgcccaccctcgcaggttcgcttccctttgtttacgccattgtagcacgtgtgtagcccaaatcataaggggcatgatgatttgacgtcatccccgccttcctccaggttatccctggcagtctcctcagagtgcccggccgaaccgctggctactggggataggggttgcgctcgttgcgggacttaacccaacatctcacgacacgagctgacgacaaccatgcaccacctgtctcctctgtcccgaaggaaagactcggttaagagtcggtcagagggatgtcaagacttggtaaggttcttcgcgttgcttcgaattaaaccacatgctccaccgcttgtgcgggtccccgtcaattcctttgagtttcattcttgcgaacgtactccccaggtggaatgcttaatgcgtttgcggcggcaccgaagagctttgctccccgacacctagcattcatcgtttaccgcgtggactaccagggtatctaatcctgtttgctccccacgctttcgagcctcaacgtcagttaccgtccagtaagccgccttcgccactggtgttcctcctaatatctacgcatttcaccgctacactaggaattccgcttacctctccggcactcaagacgggcagtttccaatgcagtcccggggttgagccccagcctttcacatcagacttgtccatccgtctacgctccctttacacccagtaaatccggataacgcttgccccctacgtattaccgcggctgctggcacgtagttagccggggcttcttagtcaggtaccgtcattttcttccctgctgatagaagtttacataccgagatacttcttccttcacgcggcgtcgctgcatcagggtttcccccattgtgcaatattccccactgctgcctcccgtaggagtctgggccgtgtctcagtcccaatgtggccgttcaccctctcaggccggctatggatcgtcgccttggtgggccgttacctcaccaactagctaatccaacgcgggtccatcttataccaccggagtttttcacaccggaccatgcggtcctgtgcgcttatgcggtattagcagtcatttctgactgttatccccctgtacaaggcaggttacccacgcgttactcacccgtccgccactagaaacaatctaaatctgccgaagcttcaataaaaggtttcccgttcgacttgcatgtgttaagcacgccgccagcgttcatcctgagccaggatcaaactctctgataaagtgtttgaatcttttactcaagacaaccgtttggctatctctcgtttttactgcttttggtttgtttaaaccgttctttaaatgtaaagaaattttcgagaatcgtatgtgtttcactgtttagttatcaaggtttgttgtgtctgtctctcagacagctcgtttattttatctcatctctttttgtttgtcaagcacttttttaagttttttcaaacatttttgagttaagattttgttgtcgtttcgttgacgacttggatactttatcatatcttctgtcttttgtcaactgcgaatttcatttttctgaaattctttttaattgtttgttttttgaaaacaattatttgtgacagctcagttataataccactgggagttatgcttgtcaaccataaatttcaattttttttagattttcctggaagtttatttttataggacaatttcttttctgctatcattcatctattatgctattatcttcctgtttattattttatatgtgttgttttttaataagactcttcgctgtatggcgctacgccggtcgcattttcaatgcgggaatatgcagggggaaggccatctcagagttccgtagcccgaaggccctccccctgcacccccaccctcttgggcacggaaggagttctgcgttgttgtgtgtgctacgttgttaacttttgtctgtatgcttcggtattggatgtggaacgttgtgccgatctggttcctggattcttcgatatttatggcggtacgctgtgccgatctgcgatctggttctgggattcttcggtacttatagtggtacactgtgccgatctggtccctgtattcttcgatatttatggtgatacactgggccgatctagttcctgtattcttcgatatttatggtgatacgctgtgccgatcccgtttctgtattcttcgatacttataggaatattctgtaccagtctgacatttcaggacaggacgcccagtccgcttccatcccccgcatgttttttcctgtcggttggaagtgtcagccagaggaaggtggcatcgggccgggctgctgcggaggaggggtgattactacttgggctacgggagacggcgttattgcggcagggcctgctgtctgagccggaggcgagttctggccctgccgcaatgcttttagccgtctcacggagccctagtagtatcccccgacggagtccctgcccggagcgatgccaccttcctctggcgtccctcaaccacatccacctctcaagacctcaaaaacatccccgactgcatccactcccggagcgatgccaccttcctctagcgtccctctatacatccgcctcacgagtccacaagcccttcccggacccgctccgtaagactgtctccacccttacgataccaatcttccacaaaagagtcaaaagagctcacaggcatcctccccataatgatctggataaatgcgttcttctccagcaaacgcaaagtctgaggaatctccccgtcaccatcccccagatacttcttctccggagcacggtaattcgcatccaccagaagccccaccgccgagatcctggacttatacgccgcccaggcctctaccgaaggcacctccgcctcaagatactccttacacgcatcaaaataagacgcctcaatggcactgagatcctccctggtcttcttatcgcccggactgtaaagaacctcacggatatgctttgtcactatataagtagcctcattataatccacattgatcattagcggacgcgccgtaggatccacattcaaggcaaaataagtgttcatctcatccgcatcctctgcctcatatctggaatggtcaaacaacacactcaaaatcttcattgcgatctccggatgctcataccctttacgcacaactacatatttattatctcgaaacgtagagtatacctccacagtccgctttacatccgcagtcagataatacggttcccagtctgcctctttattcttccgatactcatccatacgaggattattcggagtccaccagagcccgaaaaacgctccgcattttccattcaccaccagatcacggatattattctgtgcacgtaaagcaaaatccgaatccagtattccccgcctgtaaagctctctgagataccccagagcctcctttgtctcctccgtcagcgatccatagacaatttctccatctgcattttcaatccactgctgcggatatgccccgaacttttcaaacacagagtccaccgaatagctggtgctgaccgtgcccacaagtcccggatcacagacaagtcccacaggatcttcaccatcctctgcacccatccggttttcctgaaacgcacggatcactgaaaaagcctcttccagagtcttcggttctttcagtcccagctgctccatccagtcacgtctcagccataaaagttgcggcccatcatcaatagcagtctccggaagtgcaaacagttttccgtcaaaagtcccggatgccaaaagttcctctccatagctctcatacatttcctttattttatcggaagcgcagcttttatatacttccgtcagatcctcgataagatcattttcaaccagttcttccagagtttccctgtccgacaccagaaaaatatccggaagattccgatctttgaccaggatgttcagggcttcgtcataccgctcctcactctccataaaaacattcttattctgaatattcagtgtttttttcagataccgggtatatgcattgtcctcataagtctgcccgtccggaagattagaattattagcccctttcatctgtcccagagtataagttacaagctccggatatttccccagaggcgtggtttctgcctgttcccagctcttactgttcttttcggacagaacatctatatctgttttttccatttctgcagttcctaaagaacaccccgtcaaaagtgccaggctcagtatcgtactcagaaataccactgtttttcccagactaagtctcatctttttttacctctttcgggatcctcatatcaacgcttgtcccctcacctaccttgctcaggatccggatggcatatttctctccatataaaatgcacatacggtcattgacatttttaaggccatagccttttgcctgatatgtgagcagcttttctgcctgctcctgctccatccctattccgttatcttcaacccggatcactacatctccattctcttcaaagaaataaagtttcagaagcttttccccttcctccttcacatccaggccatgctccagagcattctcaacgatgggctgcagggcaagcttcggaaccaactcctgctgcacagacggatcgatattccactccaccttaaaatcattgtcatgcatgatcagctggatttccagataagcttcgatattccgaatacaggtttccacagtcaccatatctgctcccttactgagcgctgtccggtaaaatgtagataatgccagtgtcacacggctaatctccttctgacggctcttaatcgccatccagtttataatagaaagagaattataaagaaaatggggattgatctgggcagtcagcgctttcagttcaaattccttcagagcgatcttattttcatacacttcttcgatcagtcgattaatttcatccatcatatggtgaaagcttctcaccagctgtcctacctcatctccagaatcactgtaaaccgtaacttcacggcttccctggttcacctgttccatatttctggtaagctgctcaatctttctggtaaacagcttagaaaacgtcattccaagcacaatgatgatcacaacacagaagccgatcagtgggatctcactgatcaatacttttgaaaccgagctctcgatcacagccggaggtttgtaaaaataataggtccatcttgtttcatgtccgctgctgctgacataggtatattcttccctcagacgatccagcttttttgcagtttctttctgtgctgaaatatcactggccgccagattttctccatgatagacgatattttgctgatcatccaccacaaagcctccggaattccgttcaataatattagccagaggctggaatacttttccgtaatccaacaaaatacagagcacagcctccctgatcttaccatcatatatttccctgactgccgcgatctgacgattatcccggtccacgatccactgaaccgtcacggtattatttaatttgtcactccaccattccccatcaacctctgaaagcggagccaaggtatattcatggcgcacgggaatgctttctgcaaaaagatgtatccccagaattgcttcgtggtaggatttcggcaccgtcaacagcggatccacaacttccgtatactgttcatatgcagtataacgatccatatctttgttgaagatcacctcctggatttcaggagaataggtaagataattcaaaaggctggcataaatttcgatctgcccgtcaatgttttctctggtctgctccaaaatggagtacatatcctccatctcatttttccgtacaagactactcatacgactgtgactatacagtgccaacacagtcatcggcaccagggataccaccacaagaagatttgtcagcttgtaccggtatttcatattattatacttcttcagaagactcttcatcctcattgtttcctttccgataggactccgggctgcttccgtaatattcccggaagctccggcagaaatacgaagaattggcaaatcctacctgctcgctgaccatggctactttcatgttggtagttcgtagaagctccttggccttttccatgcggaacacacggataaaacgattcaggttcatccccgtctccttcttgaaaataaagctgagatagccggaagaaagatatactttttctgccagtgtttccagattcagatcttccgcatagtgattgtaaatataatttttgactgctgccacctcatctctggattcgctcatggaacggtccaggaactcctcgtactggcggatatttttttctgtaacctcaatgatctcctgaatggtagaacagccatacagatgatccacctccagatccagcctgtgctctccggcaaaacgattctcctgaaacagctcccttatcacattggaaaaaacaaatttcacatacatggccgaaaactgggtattggactgatatttggatgccaggctgcggaaatggctccacagctgcttcacatcctttctggaaatatcttctgagattttttccataagcctggaatcctgctcctcttctccggtatttttttcctcgtcctcctcgctggtgtagacatggatatccggatgataaaatttttcttccatctgctgctccagctgttccatgatttccggcaattcctgatatccgtcaaaacgccgacttacagccagatgaaagcgaacaggatgaaggcgcttcagaagattatagacattttttgccacaaggacataatcacagtacacatccttaaaaagaagcaaggactgacggccattaagattcagatagaagaaagaacggcgaagctcttcccggatctcaaggggaacctcatcactggcagaatcaaaaaaagcttcatccgattcaataagaattgcacagtgccactgctcccagacagaaaaatccacaattccttccgcttccttcagacgctcctgatctccggaataaatgtagcccaacagaaaatactgctgaagaaagctcttttcttttatggactgctgctctttatttttccgggatgcgatctccttctggatcttctgtatggtgtcatgaaagcggtccggatccaccggtttcagtacataatccgtcacaccatagcggatcgcctcctgagcaaaagcaaaatctccataaccgctgaaaatgataatttccagatccggatattcctctcttgctttttttgaaagctccagaccatccatatgcggcattttgatatctgtcagcatcagatccaccggatgctttctcagctcatttaatgccagcttgccattagccgcctcataaatctcccactctccctcctccatagacagaagaaagcggattccgtcacgttccagtttttcatcatctaccaccaaaactctgtacattcctcacctcgccaaatatggcctgatccacgtaaaagcacgcagagcaggccgtttttctttcattttaacattattcaactaatttgtcagcccttaacagctcctgcaaccacaccttcaatgatatatttctggcatgcaagatagaaggcaatgatcggaatgatggaaagaacaagaacgcccatcatcgctcccatatcaatggttccgtaaccgcccttcagatactggatggcaatggaaatggttttatatttcttgatatcaagtaccagatatggaagaagataatcattccagatccacatggtttccaggatcgctacagttacacaggtcggtttcataaccggaagaaccactttaaaaaatgtctggatcggggtacagccatcgatcatggcagcttcctcgatctcgatcggaatggattttacaaaaccgctgaacataaataccgcaagtcctgctccatatccaagataaatgataatcagtccccacggagtattcagtttcaggatgtttgcgatcttggaaagagtaaacattaccatctggaatggtacgaccatggaaaacaggcacagcatgtacatggtttttgtcagcgtgttggtaacacggttgatgtaccaggcacacatggaggtacagagcagaattaccgcaacagaaaatactgtgataaataatgtccatccaaatgcctggaaaaatccggtttttgtgagaccatttacatagttttccagacctacgaacattttatccgttgggatcgcaaagggataacgactgatgtatgcttttttcttaaaagaattaatcaaaaccagaaggatcgggaaaatataagcaacagataccacactcaggatcgcagtccacagaccgctgaattttacttttttattcattactgctgtacctccttacttcttgtgagacgattctggatcatggcaattgctccaaccaggataaagaagatcacggccttcgcctgtcctacaccttcccatccggtacgtccatagaaggtattgtaaatattcagtgcaagcatttctgacatattggaaggctcaccatttgtaagagcaaggttctggtcaaaaagcttgaaggagttggtaagtgtcaggaaagtacagatggtgatggacggcatgaccataggaatgatcacatgcttcagaagctgtcctttgttcgcaccatcgatctgtgcagcctcgatcagttcacccgggatattctgaatacctgcgatgtaaatgatcatcatatatccgatctgctgccagcacatcaggatcacaagaccccagaatccgtaaacagaagaatatgtaagtgttttattgatctgaagaagcagaccgtttaacagaagctgccatacataaccaaggatgataccaccgatcaggtttggcataaaaaatacggtacggaatatattggttcctttgatcttcttggtcagaagcaacgcaactgcaaaaccgatcacattgatcagaactactgatacaaccgtaaatgcggtggtgtaccataatgcatgtccaaaggttccatcctcagtaaaaatcttcacatagttctgtaatcccacgaattttgcatccgttactgtggtaaatttacagaaggaaagatatacgcccatgataaagggaacgataaatccaatggtaaatgccagcagggtaggcaggacaaaaaccggaaaatactttttcatcatcttattctgcatgttttctcttcctttctcctgaggatgcatccttccctactttacgcatcctctcttcattaaaagaggcaggcggaaaccgcccaccccttcgtgatcacgtttcagttatatcttatcagccttcatttgctgctttgtactcttttgcccatccgtcaacaaatgcagttttcacagcatcccactcgccggtaccctgtgcatactcaagcattgcactgccgacctggtttttccactcttcagaaggcatggttgtaaagttccatgaaaccggagttttaccagcttttacatattcgtcggctgcttttacaagcggatttgcagactcataattctcatcaaaggtcttgaatggtgttgtaaatcccatttcctggcttatagattctcttccttcatcacttgtgataacccagctgaggaaatcaagagttgcctggatatccttctcatctgcttttttgtttacgcaccagtagttctcactgcctgtgcaaagtccctggtcctcttcaccatcaacaccaatgtagattggaagcattcccatatcctcatctgctacttcgttatctttgatgttatcataagcccaggttccattctgatagaacacagcctctccaagaccaaattcagcatttgcatcatcgatagtcttgctggaaagaaggcttggctcacaggtagaatctgtgatataaagatcaaacaggttcttgaagttgtcaagataggttcctttgatcgcatctgtggatgtgattccgtcttctttgtactcataatagattggaaggtttgcaaggtgtgtcttgaagcgccagtcactggaagaatcaaagcctgcggaagtaaatgcaccgtcaactccaaggtcatctttcttagcctggatatcatctgcaaccttctttaatgtctcaaaattgttgatctcatctgcagacttgatcacagcgccatccatctcacagtatttcttaagaagcgctttgttgtaaataattccatatgtttcaattacataggcgataccgtcaactgcaccgctgtcatccttcagtacgaaatcgtcactctccacatttttataaacatcgctgtctttcagatcatagcaataatccttccaggatgcaagtccaactggtccgttaacctggaacagtgtcggaacctcatccttggccatctctgatttcagagtagactcataagttccggaagcagctgtaacaacggtaaccggtacaccagtctcatcggtgtatttctttgccaggtctgaccactgatctgcctgctccggtttaaaattcagataataaacagagccttcactgtcatccccctttgccatagccggaactgccgggatcatagtagctgccatcaaagctgcaagaccaaatgctgttgcttttttcattctcataatcgtacctctcctttaccttatatgatattcaatttgtttcgcggatatgcttaaaacgtccatttcgcatattcctgaccgataagcttcaaatcagcttctcgattaacttgatattattgtaaatcgaagaggtcattttcactatataaaaaaatcaagaaacatgttgatttttttatatagtaaaaatattgatattttaccatgaaaaaagaagccggaacaggcttgctcccattccggcttcttccatatattattttcgattcatcatgctttattgacagatccgaaaagctccattttctctttaacagtagctttgatcgcttctgctccaggtgcaagaagcttacgtgggtcatatcctttaccctgctgatccttaccctcttcaatgtatttacgtgtagcttcagcaaatgcaagctggcactctgtatttacattgatcttggaaacgccaaggctgatcgctttcttgatcatgtctgccgggatacctgtaccaccgtgaagaacaagcggcatatctcctgtcagtttctgaatagcatccagagtctcaaagcttaagccctgccagttagccggatattttccgtgaatgttaccgataccagctgcaaggaagttgattccaagatctgcaactctcttgcactcctcaggatcagcgcactcgcccataccaacaacaccatcttcctcgccaccgatggaaccaacctctgcctcaagagacatgttgtgctcagcaacgatcttaaccagctctttagtcttagctacgttctcatcaatcggataatgagatccgtcgaacataatggaagagaaaccagcctcaacacatttcaggcatccatcatagctgccgtggtcaagatgaagagcaaccggaacagtgatgttcagctcttccatcataccgttaaccatacctacaacagtcttataacctgtcatgtatttaccggcaccctcggaaacaccaaggattacaggagagttgagctcctgagctgtctgaaggatagcttttgtccactcaaggttgttgatgttgaactgaccaactgcataatggcctgcttttgcttttttcagcatttctgttgcgtttactaacatgataaaatcctcctaacctgtattaggatacggaaaaaccgtgtcctttatatccaaccgtactcataatagcagatttcctttggtaagtccagtattttaccaaaaatgctgatgctgtgggaattattattttttttgagaaaaagcttgcaattttatcaaatgttatatataatacatttgttgttcacggatggattcccgagtggccaaagggggcagactgtaaatctgttggcaccgccttcgaaggttcgaatccttctccatccagcgaatttagctcttacatctttgcgatgtaggagctatttttttgtgcaaaaagaaaaccgcaaaggggccgcaaagccgcggcccctctgcacacccctcgggctttttttaaggagttcttggttgtggatgaggggagggtgttgacttgtgtctgtatgcttgggtattggatgtgggacgctgtgccgatctggttcctgtatgcttcggtgttaattgtgggacactgtgccgatctagtttctgtatgcttcggtgttggatgcggggtgctgtgccgatttatttttttggagatacagccggctgctttattggttatggattgttttgaggccgttttctgtatgcttcggtgttggttgtgggatgctgtgccgatctggttcctgtattcttcggtgttggacgtggaacgctgtgccgatttatttttatatattgtgttttttttgcactgggcaggatgtacattcgcttctattgtctgctctctgcggttgaattttcagccggggatgtggcagcggtatgggctgctgcggaggaggtgtgatactgcttaggctgcggggatcggcgttattgagacaggggctgctgtctgagccagaggcgagttctgcccctgtctcaatgtttttagccgatttccggagccttagcagtatccgccgacggagccctgcccgtaccgctgccacatccccggcgtacggttcattccatccaccacacttccatccaccacacaaagaaaaagacggccaccccaaaaaacgagacagccgtcctttcctcacacatcatacataggaaatcgaaacaccgaaaaaaatctatttgttaactctgttaaccgtattaccatccagaaaagccttgatattatcaaccgtaatatccatgatcctctgtctggaagcctgcgcagcccaggagatatgcggagtgatgatgcagtttttagccttgagaagcggattatccccccttgatcggctcagtagaaacaacatcaagaccagcagcataaaccttcccactattcagagcatctgccagatcctgctcaacaacaagctgaccacggctgttgttgataaggataactccatcctgcttcctttgtttgcaggaacgataacatctcccggctgaaccatatccagtgctttatggaacagaaggttatctcctgccggtgcatttactgtaaatgcagttcccagaagtcttgccttcgggttcagcgggaaaatactggaatctacggcagcgatctttccacagttatcatcaatatttgcaaccggaatcccacggaaggcttctactaattcttttgacggtctttcaaaatttcgtctgatcctacatcctaatgccatatgaaaacctctcttcttttgattttcttttttaattgtatttatcatatcatacaagcttactattgaataacgaataatttctctgtataatataaataatttttatattatcaaagcttaaaccatcctatagacaacaccaaagaaaaggagctgttcatatgaatcttgctgaaatcgaaacctttctcaccattgtaaataccaagagcatcacccgtacagcggatcttctttttctttcccagcctactgtcagccaccggctcacatctctagagaacgaactgggttttccccttgtgatccgtcagaaaggccacaagcaggtggaactgactgccaagggaacggattttatcatccttgcggaacgctggatgtctctctggaaggaaactatggagctgcagcgcaatcaggattccctgctgcttaccatcggctgtacagacagcctgaacgtagctgttttcgcaccactatatgacaggatcttaaatgagcagaccaagctggacctgaacatcgagtcccatcattcttcagagctctacggtcttcttggagaacacagcattgatatcggatttgtctaccacaaattgcattacaagaatattataacagagaaaatcttcgaagaaaaactttatctgatacaatcggatcagccagtgattccggctccggcaatacataccgatgagctggatccatccctggagctgtttttaagttgggatgacaattatcagatctggcatgaccgctggctttcctccgcttccaggcctcacattgcggcagataccatcacacttttggaccgtctctggaaaaaaccgggaaactggatggtcgcaccacagtctgtgatcctggagctttcccattaccggcctctttttatcagtgaactgaaaaacacaccgccaaaccgtgtctgttataagatcaagcataaatatccaaagtccaccagcaaacgtgccgtggaattcttcgaaaatgcactggaagactttcttgcagaatccactccgtccttcccgatcggccaggtatgggaacgacagaaataaaaaaacggtaagcacaagtccgtcaggaagattttctgctttaccgtttcttcttattatattatttataccaggatttttgatccaccgctttccaccaaaaaagcggtgggtattttttatctgatcatttgtttttcagctcttccactgcttttttgatccttgcacatgcttcctgaagatcctatttgtcacaaaaattgtcataaaagagccacgcccgataaagggaatggctctgattattacattacattttcaagcttttttatttcattctgtactcttgcagcatctacgtgattgtatatgttcattgtaatgcttatgtcactatgtcccatgatcatttgtaaaactttgatatctaggccagcttctgcacatctggtgcaaaacgtatgcctcagcatatgtgggtgtgtcaagtataggacaaaaaattttatttttttctgccgaagactatctgacgtttccatcaggtagtcccagcacctttattatcttctgataaatcattcttgtcctgctcaagttatctctgttctgaaaaaatatcgtcaaaattccattcgatttcaatttcatcctgaatcaaagaaacagcagcacccgtcactgcaatcagccccactcttcagttcatacaggtaagccacaaaagaatacagataaaattcagatgcgcactgttccatgtgtatgtctgaaaaacaaatcatcacacctggcattactcggtaaaccgtcataacgccctctcctgtcgcatcatttaacataagaacagcgcaattctcattctgaatcacaggcttcacattccttccaagacttgcaatttcatttacattcaaatttcttctcctttcacatagtagtatttctttgtgttagttttatctaacctttttctgttatcttaacatgagaatcgagcattatccagacctgaacggacggcaataatccctttagacaaaaataaagttccagacttattatctgaaactttattataaatccagcatcattgcattacttcacacaacggaaatataccatagaaccgtcaacatggatatccgtttctttatatagttttggaaggatatctctcagctctttctccgtctgaaacggtggagaaaaccaccctttctttgcaagaatattttttaccagccaatctgtccgtttcgattttcccctgatttgacactccccacagctaaagtagggggattcttgcttctcccactactgcattggcaaacaccttacggtactgcaatgtcttacacagtgtccacaagctatatttatactgttcccgtatgccctacggtacagtttttatctttatgcagactgcatctgcagtccttttttcagaatattgatacttgcattcgtatcccggtcatgaaccgcatggcatttgggacactcccagatacgaatgcccagattttttatccgtggatttctgtagccacaacagctgcaggtctgactgctcggatacatcgttggtactctgtgaatttcatttccataccagccagctttatatttcagcatttcaaaaaattttgcccaggaaacactcgctatcgattttgacagtttatgattccggatcatccccttaacattcagatcttcaatacagatggtttggttttcacgcaccagcatcgttgactgtttctgcaggaaatcattccgctgattggttactttctcatacactcttgccaccctgatccgctgcttctcgcggttatgggaatctttttgttttcgggaaagcctgcgctgttctcttatgagttttcgcattgagcgttccagatatctgggatttgataccgtatttccattactgtcggagtagaacgctttgattccgacatcaatccctatcgttccgccagcatttgagcgtggttccggttcaaaatcaacatttaaaaccgcaaaatattttccagccggtgtgtgctcaatgatcacgtgattaatcttttccacttccatcgactgccgtattttaacaaatccaagtttcggaagtttgatatatcttcccacaatacgaatattatctttttgatttaccgttctgtatgactggaaccggttatgtttacttttgaaggttggataggaagcccgtttctcaaagaaattcacaaatccccggtcgagatcccgcaaagactgctgtaatgcaatggaatctgctgctttcagaaaggcaaactcctcttgctttttcagttcagtcagcatggcggaagtctgggaatagccgatcttttccccattttcatagccttccttacgcatggcaagtccccggttgtagatgaaccggcagcatcccagggtctgatggatgaagtttttctgttctctgttcgggtagattctaaatttaattcctttttgcattatcccatcttatccttttgtctctgcgatgttttctggttttcaatatactgttttactgtttccagcggagcaccgcccaccgtcgatacaaaatagctgtttgtccagagagtcggcattttcgttttaagatagggaaattcctgtcttaaaattctggacgtatagcctttaaatgactttacagctttgtggatgccaaactgaggatctacttccaaaagcatatgaacatgatctggcatgatctccatttccagaatgtctacagaaagatttgtagcatactctgtgagcagctccttcagccggacgtccacaccgttaattaatacttttcgtctatactttggacaccatactacatggtatttacaggaatagacgacattgttgtttgatttatatgttgtgttcatatttatattatattatggttcattagttaatacaattactattttgtccatcttcaattacttgcataaattcgatggacgcgtcttatatccccataactgaagcaaggggttttacgacgcattggataaaaacaggcaatgaaatcgccgcctggtttcaaaacacgccatatttcatgaaatgctttttgcttatcaagaaatgcatgaaaaccattcatactgacaacggtatcaacagattcattctccatttgcaggttccccacatccccctgaatacatttgatatgcgcatgactaccaagtctttttctggcttgttcaagcatatccatgctgtaatcaatacaagtaatatgtgcatttttcagagaactccatttgttttccgtaaatacagcagttccaaccggaacatcaagaagatttcctgaaaagtcatcaggaacatatgataaaacttttcgtgctatatcattatcatccgtgccactccaaaatagcttaatatacagtttgctgaaaatatttctttgcgtaagaacatcgtcatatatattttttgatgtttcataagcattttgtattttgtctgccatattaccctccaaatttaattttaattctaaaagcttaaaactatcgttctctaatcttcctgacattacgattcatgaggtgtcttccaatatgtctataagcaaatgctttaaaggctgaaatttcttgatgatgttccttcaacagttcatctggacaatcataaacaccaaaatcctgattgattccctcgctctgaatataagtattgttcctatcaaactcaataatgagatttctgaaatccttgactgctactccataaccgcaaaatgcacctgtacattccgaattttgttcctgtaacttctttatgtaggttttatccaaaatgaaagcttccagttcgtaccactgattttcgaaattaatttctacccagctatggaaaatactttttggagcattacggtaaacaaacccggtcatagcccctttctgcaatcttttatcaatcgtaaaaccatgtactctgcatggaatattgcaggcacgtaaaagtgccataaataaagttccttttgtattacattgtccataaccatctgcaagtacttttgaagctgaaattccgtcatcaatattatatccaaataaaacatcatctcttacatagttgtagattgccttaatcctttcaaattcacccatttccttccatttcatattttgaataagtttttgaattgccggattagaaaaatcaaccattcgtgtttccctaagatacttatctttcatttcctatcgcctttcccataggttttctcacaacacaatgcattcgcatacctttacgaatttcaaatttttctacttttaatcctgcttttttgcaacattttatgaccacatctcttgttggcacttggacatctccatgtccgcatatatttgccaacggcatttccaatgtattcattagccataccaatactttattgtcactggtcacatctctcagtatcaatcttccatttgggcgaagacatcttttcacactgtcaaaaaatgcctgtggatccggataatgatggaagctcatagaacaaataattgcatcaaatgaatccttttcaaaaggaaagttctcacagtctcctacaacaaatgttgtatttggtatatttttcttttttgcctgttcaatcattgccggagtcagatccagtcctgtataatgccggtctggatgtttttctgctaataaagaaatcattggagcaggcccacagcctgcatctaataaatctctaaatggctccttctctaattcttccagaatatccggataatctttcttgcacatttcgtaaatgccagcatggttactttcatatcttcctgctgcttttgtaaactctttaattgacaattttttatattcttcatttttcatgcttttttctccaatcactgtacctttttcgccttgcatccgcatttcttcatttttttcatataagcataaaactgcttatgcaattccctcatttcatctggtgccttcatagcatgttgatacataaatttatctccaaaactgtttccaaatgtaactgccagcataatcgtcagaaatgacaatggtaaaaagcgaaaaatattcattttccatggtgacagtttacccttttgttttcgcaaaaaattaaaatttcttttcagcctttctgctgttttcctcatgattttccattcttttcccactttctccggatcgtctgattcataatacgcatctgcaatcggtaccaccatagcaagatgacaaagctgccatagatgcatatccgttactttctggtatggtatatgagcatgcctcaatatctctgaaaactgcttagttctttcggatttatttcctgatatttctgcaaatgttgtcggctgaatcaaccttggagtaagtgctgcatcaaggataccatcatcatttatacttccgcctgctcctggaaaagccggtaatattcttccttttccaacaatgtcttcccatttattgtaactgtccagtgaatttatcactgtaacaatcgtattacttttattatttttcaattcagtaagtgcttcatacagctggttttcccggacagtaagcaagacaaaatcataaatatcatcgtttggtagttctccaagaatcctaatctctgcctttattacttcctgatttttcttatatttcaatccattatttcttaaagcctcaagtcttttacctctggcataaatatttgtatcataaccggcttctgcaaataaagccgcatacaaggatccaatcacaccagcaccataaatcaatattctcataagaatctttcctctcctcttaccccagtgccacatccaagatcatcatcaaactaaatccaagtgcaaagaaaagcgtaccgatattcgagtgctgtccctgagacatttccggaattagttcttcaaccacgacatataacatagctcctgctgcaaagctgagtaaatatggtaatgccgggattaccagctgtgcgacaagaatcgtcattactgctccaatcggttcaacgactcctgaaagtacacctcccagaaatgcctttctcttactttcaccctctgccctaagcggcatggatataatcgctccttctggaaaattctggatagcaattccaagtgataaagcaagtgcacttgttgctgtaatctgtgcattttcagcaagaaatcctgcatacattacaccaactgccataccttcagggatattatgtaatgtaactgccaacaccatcatcgtagtacgtccaagtttgcttttcggtccctctgcctgatcacttccaacatgaagatgtggaatcaaatgatcaagtgcgaataaaaacaatataccaatccagaacccaacaactgccggaacaaacgataaagttcccatattctcagattgttcaattgccggaatcagaagactccagattgaagcagcaaccattatacctgctgcaaaccctgcaagtgcacgttgcagtaacttgctaagtgtttttctcataaaaaacacgcatgctgcacctagcgttgttccaacaaatggaatcagtataccttcaaaaacattcattagcattatgtattcctttctgtatagtcaaaagtactttcacatcgttctgttgttagctttaactaactaccatgtataaaagaaaccgtgcaaaaagcaaactgtaatttcacacggttttccttatgtttaagtatatcacttccgaaatcatataacaatataattcttttaacaatttacaagagaaagatcatccatgtatgcacgatctgcaaaaatctcagatgctgtgcgaagtcccttgctctcggcgatatcaccaagaactgctcctgcacagtaataaacgatcagatctttatcatactcgcagattgcctcacagatcgctgtggaaatgtcctcgtcatactggcaggaattccccattgctccatgaggagcgacatgctgaaacttcattccgtagctcttggtaaatgcagccagtgctccgatctggtatctgacataattcttaacttcatcatgagagagaaccatctttcttcgtccaaagccaagaaaatccggatatccaggatgggctccaaccataacgccacgttcctttgccatgcggactaccttatccattaccatcggatcgcctgcatgccagccatatgcaacatttgctgttgtgacatatttgatgatctcttcatcgccgccaagcttatatgcgccaaagctctcacccatgtcactgtttaagtcgatactgtacatgttgctacctttctttacttgttgaaagtataacatgttaaataaaaataataaaatagattattttttcagaatatattaatattttctatatttcttttgcaataaattttacttttctttgatccgttctttgaaaagctgttgacaaagatttttatatatgattaaatagtcatatgaacattaattcatatattcatataaaaaacaaacgaatcagcaaggagagttcatatggaagaaaaattaaagaaagattccatgaagtccgcagattcctgcggctgcggtcacgaacatgcgcatcacagccatgatgagcatgaagaacatcacgatcatgagcaccatcaccatgatgagcactgcgtctgtggttgcgagaatcatgaccatgaagatcatgaacatgagcatcatcaccaccatgagcactgcggctgtggttgtgaggatcataaacatgaacatcatgaacacgagcaccttcacaaccatgacgaacactgcggctgtggctgcggggatcacgagcacgaacatcatgaacacgagcaccttcacaaccatgacgaacactgcggctgtggctgcggggatcacgagcacgaacatcatgaacatgagcatcatcatcaccatgacgagcactgtggttgtggctgcgaggatcacgagcacgaacatcatgaacatgagcatcatcatcaccatgacgagcactgtggttgtggctgcgaggatcacaagcacgaacatcatgaacataagcaccttcaccaccatgacgagcactgcagctgtggttgtgaggatcataaacatgaacatcatgaacacgagcaccttcaccaccatgacgagcactgtggctgtggctgcggagatcatgagcaccatgaccactcccacaatgctctcaccgcaaagcgtgtctacattctggagaacctcggctgcgctcactgtgcttccaaaatggaggaacggatccaggctcttgaaggcgtcgaaagcgctaccattacttttgcaacaaaacagcttcgcttaggggctgcagatccagacgctctgcttccgcagatccgcaagatctgcacatccattgagtctgaagttaaagttgttccgagaaatccagctccggcagcttccactgacacaacaaccaagacctatcttctggagaatctaggctgcgctcactgcgcttccaaaatggaggaacagattgcaaaccttgaaggcatttccgaagcaaccatcacttttgcaacaaaacagcttcgcttaactgcaaagaatccggatcgatacctggatcagatccgtaagatctgtacatccattgaatccgaagttcttgtaaaagaaaaggatccgaagccaaaggctcagtccccaaaaacagcgactcacccaaccgcttccaagaagaaatttttctccaaggaaaacatagatatcatctgcattatcatcggtgcagtactcttcgttgccggagagatcatggaacacaaaggctttggtaccagtgccactcttcctgtatttgtgatcgcatacctggcgcttgggggtgttatcgttgtaaaagctgccaaaaacatctctcacggacagatttttgacgaaaactttctcatgagcattgcaacacttgccgcttttgccatcaatgattctgctgaggccgtaggcgttatgctcttttaccgcatcggcgagctttttgaggaaaaagccgttgaacgaagccgcgggcagatcatgaatgccgtagaccttcgtccggaagttgtaaacctggtcacaggcgatgatatccaggtaattccctctgaagaggctcagatcggagacattcttctggtccgtcccggagaccgcatccctcttgatggtatcgtaattgagggaaacagccgtatcgacacttctccgatcacaggagagcctgtaccggttgctgtaaatgaaggtgatgagatcacttctggttgcgtcaacacttccggccagcttaagatccgcgtggaaaaacctctggaagaatccatggtcactcgtattctggattccgtagaaaacgcggcagcaagcaaaccgaagatcgaccgctttatcacacgttttgccagggtttatactccttgtgttgtaggaatcgcagtggcaactgccatactcccatcccttgttaccggaaactggcattactggatctacacagccattactttcctggtaatgagctgcccttgtgctcttgtacttagtatcccgctggccttcttctctgggattggtgccggttccaaaaagggtatccttttcaagggtggcctttccatcgaaggattaagtaagctcggcgctgtgatcatggataagaccggtactatcacagagggtaacttccagcttcagaaggttgttgccaccggtaaatacacggaaaatgaactcctttccatgtgtgcaggctgtgaacagaactccacacatcctattgcaaacagcatcgttgctgccgcaaaggaacgtgagatccaatttgaaaaaccgatctccctggaagaaatttccggtcacgggatcgttgcggaaatgccggagggaaaagttctctgcggaaatcgcaagctgatggataaattcggagttacaatcggagaattaaaggaagccgcttacggctctgaagtatttatggcagtaaacggaaccttcgcaggatatatgctgatctccgataccatcaaacctgacgcaaaggaagccattgcttctctgaaaaagcttggtctccacaccgttatgctcactggagactccgaagacagtgcacaggctgtaggaaaagatgccgggatcgatgagatctatgcaaagcttcttccggaggataagctcaatgccctgaaaaaggtccgccaggcacatggaacggttatgtttgtcggtgacggtatcaacgacgctcctgttcttgcaggtgctgatgtaggtgctgccatgggaagcggtgcagatgctgccattgaagccgcagatgccgtatttatgaattccaatgtagatgcgattcctcagtccattgccattgcacgaagcacaaaccgtattgcatggcagaacgtaatatttgccctggtgatcaagatcgcagttatgatccttggtcttgccggacatgccaacatgtggatggccgtatttgcagacactggcgttgccatgatctgcgtgctgaattccattcgtatcctgtataaaaaataagatccgttctgcagggcagatatcctgcagcgaatccctgtgcatccatacaactccccagtgatgcagaaaagaatttgaccggtgcgtttttttcagctacaatagaagttaacagtttggaggatacgcaaatgaagaaaacacatatagattacccgatcaatgatgatacactgtaccggcttgccgacctgttcaaggttttcggtgatcctaccaggatccgtatcctgtacgtactttctgtggaagaactctgtgttcaggatattgccgatcgtctttccatgacccagagtgccatttcccatcaactccgggtactgaagcagatgtcactggtcaaatttcgaagagatggaaaaaccatttactactccctggcagacagccatgtggcaaccatcatgaatcagggtctggaacacgttacagaagaataacgcataaaacacaatgcaaaaagccaatctgcttcctaatggaagaacagattggctttttttctctgccttactcgtgcatcatttgtatttatccctcgccctgtggtgaagcaccatcgctccgtatgcaggcatcttcacctgaagaatccctgcatctgcaatatattcttccggcatttccgtataaccctctccggaagaaagcatcaggcgctgaaaagccgttgcttctttccggcttacaccggttttccaggctgttacccttatgtctctctcctgatcctgattattaaggatcactatgatctgttcagaatcagaaaaacgaccatagctcaagccctgatgatcgttccacagaaattccagggaaccctttgcaagaatcggatatgccttgtgtatgcagatcatgcgtttatgaaagtccagcatctcctggtcttcttttccccagggataagttctgcggttatccggatctgtaaagccgcagacgccggcctcatccccgtaatataccgtaggcgaaccaggccacgtcatctggatcacaacagcctctctcatgatggcaggattgatgcctgcagatgctgcctctgcgcctgcgtaggaaagccttcctactctgtgattggtccttgtcaaaaatctggaatggtcatggtttgaaagctcattcatggctccataaagcgctcccatatgcaaagactgcatatgatgcttcatcgccccgataaaggcctcactgttgccataaaggtcctcccggtactcatcactgtgcttctccattccggtcaggaaccaggttacaggctccataaaagcgtcatagttcataaccgtatcccactcatcgccgcgaagccagctttccggatttccgtagtgttctgcaaggatcactgcttcaggattggcttcttttactgtcctccggaactctttccagaagtgatggttaaaatcattgctgtggcccagatctgcagctacatccagtctccagccgtctacgttatacggcggcgaaacccattttctgcccacatcaaggatcgtccggcaaagctcctcagattcttcgtagttcagctttggcagggtatcatgggtccaccagccgtcgtaggttggattatagggccagcggttctgatcctggaagcagaagaaagaacgataagggctgtccgccgaaacataagcccccttctcgtagccttcctgattttcatagatccgttccctgtccatccatttattaaaggatccgcaatggttaaataccccatccaggatcactttcatccctcttctgtgaatttcctccacaagctcctgaaaaagcttattactggcctccaaattccgtttatcggtcacacggcggatatacttaagggcatgactgttatcactgtctccgggacttaacagaccatcacagtccgctacgatccttccgatatgcggatcgatatgatcgtaatcctgacagtcatacttatggttgctgggagagacaaagaccggattcagatagatcacatctactccaagctcctgaagataatccagcttatccataactccctgaagatcgccgccataaaattcccggacacccatcacagccggaaccttttcccagttatccacttttacggaagtgtccccgatatagaaatattcccctgtttccacatcattggaaggatctccgttacagaaacgatccacataaatctgatacatcacagcacccttcagccactcaggcacatgatatccgggatagatctcaaattctgtcctttcctcatgtctggtgcttacaccatttgtatcataataacaggtaacaagtcctgaatggatctcaaagtaatatcgtacaagatcttttcccattacgatctgtgcagtataataatcaaagcttccggaagttttttcccgcttcatttccagatattctccgtcatgcacaagacagacgttgtccacgttatttctctgggtacgaaaacggatcgtaactgtatcaccttcccgcggctccacaggtgtacggtaatattccgtcccgtcactgaacattgcgtctttatttaataccggactcatattgagtatataccgcatcttctttgcagtctccatgctttcatataacattctatcttcctcattccgtttttagtaccatgtttttaaatatattatcttaattttttccatcccgtaagcatatatatctgttttctccgtaatccgtctttatttttgggcagtaaaaaaggcagctggttaagctgccttttttggagaaggtatttcttcttatggggtgtagcaaaaactatataatgtattggggggtttttacggtatttatagtaccatgtgtccaccaaaaagtgtgcacaaagttcacaaaattcaatttttttttttgtgcattttattcgtttgtttttgcaacctcttctttttctgttgtaaaaagtgcttcaaactcttcacgatgtatcttttccttctcgagaagaagggccgcacagctgtgaagaacgccgatattctcacggataatgctctctgcattctcatggcactcacggatgatacgggaaatctccccatcgatctctcttgccacttcctcactgtagcctctggtatgtgccagatcacggccgataaatacctcatcgtcatcgttgccgtaagcgatcagaccgattttttcagacataccgtatttcattaccatagagcgtgcagtctctgtggcacgtttgatatcattggaagcaccggtggtgatatctccgaagatgatctcctccgccacacgtccgccaagaagcgtggtgatatcctccagcattttgttctttgtattaaacatctcatcattatccggcagcggcatggtgtagccggcagctcccattcccgtagggataatggaaatggtgtataccggatccatatgaggaagtacatggaacaggatcgcatggcctgcttcatgataagctgtgatctttttctctttatcagagatgaccttgctcttcttttctgcaccgatcccgaccttgatgaatgctttcttgatatccttctgcatgatataaggacggccctcttttgcagcatcaatagcagcttcgttaagaagattctccagatctgcgcctgtaaatcctgcggttgtctgggcgatctggcgaagatccacatcatctcccagcggtttgtccttggcatggaccataaggatctcttctctgcccttaacatccgggcgtcccacaccgactttacggtcaaatcgtcccggacggagaatcgcaggatccagaatatccacacggttggtcgctgccattacgatgattccttcatttactccaaaaccatccatctctacaagaagctggttcaatgtctgctctctctcatcgtggccgccgcccataccggttcctctctgacgggctaccgcatcaatctcatcaataaagatgatgcacggtgcatgacgcttgccctcttcaaaaagatctcgtacacgggaagcaccgacaccaacaaacatctccacgaaatcggatccggaaatggagaaaaacggaactccggcctctcctgcaactgccttcgcgagaagagttttacctgttcctggagggcccacaaggatcacgcctttcgggatcctggcacctaccttggtatacttctgtggggatttcaggaaatccaccacttcctccagatcctccttctcctcctgaagacctgcaacatccttgaacgttactttcttatcatcaggggacgacatcctggctctgctttttccaaagttcatcatcttcgcattgcttccgccgcctccggacatctgccggttcatcatcataaagaaaaagagaaggatcgcgccggtaagcactaccggaagtactgttccgatcatggagctgtccttgggtacattgcggatcgttggatcgatatcatgttcttcaagaagcgcctccgcttcctttacatcggttacgtagactgtcttctgaccgtctgaaacaatgtttgcggttacataaccggtgggcacttctctgttctgatggatcaccgcatccgtcactttgtcttcttccagagccttttccagctggcccattgtgtagctgccctgggtagatacctggtcattgagatacagatatcctgcgatcagtgccacaataagcagaaggtacaggcctatcttacctgaatgcttgctcacttggttaaatctcctttcagtcctgaagctccactactccgatgtaaggaaggtttctgtatttctgggcataatcaagtccgtatcctactacaaactcgtccggaatattgaagcagcagtaatctacctctacatctgtcacacgtctctccggtttgtcaagaagtgtacagagtctgatgcttgccggatgtctgcccttcaggatacgcagcagatagcttaaggttctgcctgaatcaatgatatcctctacgatcagaacatctttcccgtccagtggctgatccagatccttgacgatctttacaacaccgctggatttcgtatcatcaccgtaactggacacagacatgaaatccagtgttaccgggcgtgtgatcctcttggcaagctcacacataaagaaaacgccgcctttcagaacgcagatcatgtgtacatcttttccgtcataatccttgttgatcatatctgcaacttcctggatacgggcatctacctcttcttcactgagtaaaaccctgattttttcgctcatgctaaagctcctccttggtaatgtaattctaacactctccctgtagtggaagtgatcttatacttctcgttcatccgtcctcccggaatccagagtatctcagatcctgccgcaacaaccggaaacctgtctctcatctccgccggaatcttctcatcaataaagatccggttcagcttctttcttccgccttcactgtttacagtaagataatctccctgtcttctggtccgaacgcatggactattttttattttatcataatcaaaccatttcgtatactttttttcttcaatcttctgtttcttataagaaaaaattttcgactcaaaaactccgaaaggactttccagaattccaggtaccggaagctccatagacatttctctgagacctgccgatacttttttttcagtggaagcagcgttctctctgtctgatgcagagttctttttcagacatacccctccgtactgtcgtattacccgcagcgattccggaaggttgatataacgaccgttttcttttttttgaagcgaaaggacctggtccacatgaagagatgtaaagtccttacgttttcctgacagtatctcaaatgcctccatcaccgcatattcctgaaggataggatcctgtgcaaaaaatttttcatccagaaaatagccattttctttccggcagcctgccagaagctcccttccctttttctgaagatacgaatctgcctctgccagaacccgtgcggtttctgccatatgctccaccgcttttgcattgatcttctgttccatagccggaagaatatggttacggatccggtttcttgtatagtcatctgaaagattgctgctgtctgtgatataggaaatacctctctctttcagataattgacgatctccttccgttctaaacacaaaaccggccggatgatctcaccatttaccgcctgtatcccagaaagtccccggataccggttccccttgccagatgatgcagcatagtctctgccagatcgttgcgattatgtgccagcgcaacccggaactgtccattcttttttgactgttctccggaaaaaccaagtctctgtttttcctcctgaaacgcctgttttcgcacgatccttccggtttcttcttctcccagcttccactttccggaaagctccggaactgaataatgcctggaccggaaagggattccccaatcccggcagattttttccacaaactgctcatcccggtccgcctcctggccacggattccatgatggacatgaaccacttccatggaaaaaccgatctctttctgaatacttttcaaaatatgaagcattgctatggaatccgcccctccggaaacccctgccacaaccatatcctctgctttcagcatccgattgtctctgatatattttcttacacgtgtgatcattttttctcctgtaaccaaaaatactctattttttccacaatcctgccacaactactgtcatatcatccctggcatgataatcactgtatcccaggaccctttccagtattccccgtcccatctccctgggctctttttcccggacatccataatgatctccttcatggtttcctcttcccgttctgtaggaagcgcatccagaactccatctgtcatcatgatcagataatctccatgataaagcttccttgaggcagtatcaaaatccagctgctggaccaagcctgctgcaagattttccgaagcaatggattccacccagtgatctcttttaataaatgtggaagacgcccctgctttcagaaaatcacagatcccggtataaagatccaccgcacagatatcgacagtagaaaacatcccttcccgtcctttcaatagcagtgcggaattcaccattctggcagctgtttcctgagaaaagccggattccagaaattgttccagaagttctaccacgatctcgctttctttaaacgcttctattccggaacccatcccatcagacagacagagaaaaaacctgccatcctcttcctgacgacagatataattgtctccggaaaccttttccgcttctcttgtaagccgcgctactccgtaaagcatctgataactgacatcctccacaaaatggaccatacgaaaatctccatttacaatactgcggctgtcggcgtccggcgtcatggagcttccgcagatcctggacaggatctgtgcgatctctgtcatggaaacacactgtccgctcctggctctcagattcagaaatatctgccgtcttccttcgatcttatccatgacccagacattctttacaagtacatgctttttacgaagagcctttttcagatcttcctgaaactgcggatctgccggcatgatatcatacagctcttctgccatatgatccatgatcctcgagatttccgtcagctgctgtgcaactgcaagccggctttcgatcatccggttatcccacacgagattctgcctttcttcacgaaatccctcattcaggacctgaaaatactgggcggaacggccacatgctcccatccattcactgcgtgctctctggatactctcttcattgccttcctccatggtacggatcatattctcactgccccgcatggtttccccggcacgctccccccagcagatctctctctgataacatctggaacatacagccgcactggtgtccgatatgatacggttcagctgtcctccgctcaaaaattccttacggtaaggcattccgtagaatgtatccgcaagcttccggaaggatgctgcataccgttccactttttccttctggggatggctttcacaaagcggcagcatttcttctttttccttcgtttttcccgaaaagacagtttttgccatgtcccggagtatcagcagtatgctgactacgagcatggcaatgatccattcctgcatattttcccctccccttataaccttcactgactgaacattataaaggaagatccctgaaatatctgtcaaagccgcacgaaaatgtcaaaaaaaatttcgtcgaaacctttgattttcagctatttttcttcctgaaacacgatctcgttatctttcacaagtcccagcttctcacgagccgcctcttccacatattcgtcggtcttcatatgttctttctctgcttcgatctccttggtacgttccttctcactttcaatggacttctccagtgctgtagctttggaatcataataatccctgcgccgttccagagtcttactctgcagcataaggcttcccagcaacaccagtgcgatcaccatgatccccgccatgccaagataattatatccgatccgttttttttcttttcccttttttggatttttcaatctgctgctccttttttacacaatctgatctctttaccttttacgagcttatacatccaaattttacaacttcttcaaaaaaatatcaaccggtttactgtcattttagctttaatggaacagtctttttaaaagggatccttcttttttgtcctttttcctgccaagataggtaagactgtcgatttttccctccaagctaagctgcccgcttttcagatcaagatgttttacatgaagtccttcgccttttatggataactttccttcctctgtatgcagcagtatttctttttcatcgaaagagatcacctcccggattcccgttatggtgccgcctttctgccgctccaacatcagactgtgaaatgctgccggtttcttctcgtccaatccatacctccctggggataatttctcttttattttatgaaaaatccatccggaatagaccatcacgcccaaacggcagctgtccctgcatcagatatagcggaacatgctttccacctcatccttttttaccgtttccttaacttccaggacttcaacctttacattacggcttccaaactggatctccacagtgtcaccggtctttacctgtacagaagccttggccggcttgtcattgaccagaactcttcctgcatcgcaggcttcatttgccaccgtacggcgtttgatcagtctagatactttcagatatttatcaagacgcataatttttcctcctaaaaaagcaggggaaaccaaaaaccggtttcccctgccgttatcactctgaaccaacagattatttaccgttgacaacgtcctttaaagcttttcctgctttgaacttcggagacttggaagcctcgatcgtcatggtctcaccagtctgaggatttcttccctctcttgcagctcttgtgcttacttcgaaagttccaaatccaaccagctgaatcttctcgccttttttcagttcatctgttacaacatcgataaaagatttcagaacagcttctacatctttcttggaaagattggtgtctttcgccattgctgccactaactctgttttattcatggtgtttcctcctataattgatgttctcttatttttgactttgctttatatatataccgcttttggcttataatgtcaaggtttttcgcatattacaggcggaatgtgaccattttatcatttcatggaatcaaccatttcaagaacagccttgcccattgcatcggatttctcgtctgcatctgcaagagatgttcccttaacgccataatagaatttaaccttaggctctgttccggacggtcttacgcaaacccatgcatcatcggtaagctcatagtagagaacattggaattcggaagtcctgtcggcttcttctcacctgttgcaagatctgtgatctcatccagcttgtagtcacgtacagcagtcaccttatgtccggcaaactcagcaggcggattctgacgaagtgttgtcatgatctcctggatcttctgaagtccctcgatacccttcatggtaactgcctgaatggcatccttatagtaaccgaactcctcatacatatcgatcattgcatcccaaagagtcttgccctgtgtcttatagtaagcagcagcttcgcaaagtgccatggtagcaacaatggcatccttgtctcttgcataggttccgatcaggcaaccgtagctctcctcaaatccgaaaagatatgtacccttgccactgttctcaaatccgaggatctgctgtccgatgtatttgaatccggtaagtacttcgataagattcacgttgtatcccttggcaatggcatctgccaggtttgttgtaacgatagtctttacaagagctccgtcctccggaaggcttccgtttacagcctttctctggctcagctcatagtttgcaagaaggcatccggacatgttaccggtaagatcatgatactctccgtttttatcctttacgcggacgccaagacggtctgcatccgggtctgtggcaagtacgatgtctgcatccacttccttcgcaagcttcaggccaagctcaaatgcctctgctgcctccgggttcggatagctgactgtcgggaaatccccgttcggaagctcctgctccggtactacatatacattctcaaatccaagctctttaaggatccttctggccgggatattgccggttccgtgaagaggtgtgtaaacgatcttcaggttcctgccctctgcctggatcgcatccatatggatgatctgtttcttaagctctgccatgtaagcatcatcgacagcctgtccgatcacttcgaaaagtcctgcctttactgcgtcttccttgtccatggtctttacggtattccagtcggagatcgcctttacctcgcccatgataccggaatcatgaggtggtgtgatctgcgcgccgtcctcccagtaaaccttgtatccgttgtattccggaggattgtggctggctgttacgttgatacctgccacacaacccagatgacgtactgcaaaggaaagctccggtgtcggacgaagtgtctcaaagatataagccttgatcccgtttgctgccaggcaaagtgctgcttcctgggcaaactccggtgacatatgacgggaatcatatgcgatagcaactccctgggatttcttgtcaaccttggcaatataattggcaagcccctgggtcgctcttcttaccacataaatattcatacggttggtacctgcgccgatgataccacgcaggcctgccgtaccaaactcaagatccatataaaaacgctctttgatctcattttcgtcgtctttgatcgctttcagttcttcttttgttgcctcatcgaagtatgggttttcaagccactgattatagatttctttataatccatgttccaaaatacctccctgtttctttatataagatacttaatattatataacaattttcagaaaaagggaagttttgtttttgtcacattcagaatcattactacctgaagcactgttttgaaaattcctcccactgttttttctgatggatcagggttctcagcttttccacattttttccggagatcacagccttgttatgtgtataataatggtttgccagtttccagtatttttccggataacagaaccggactctcaggttctgccactcagactccgagagcggccgtacggaatcatatgcagaaagcatcttctgcgcgaggtgcagatcccaactgtatttctccaggattttccgcataaagcggtacagatctgccatctgcacatcaaagctccagtgactgaaattcgtcaccgctgtgtttttcccaagtatcagcacattatgctgattatattcgccatgacagatactgccgctttgaagagactgctgccgcagatttttataatccgtggtttccagcatagctgccgcttcttctcctttttgcagaaaccattccacgcttttcagataatctttctcaaaataattgaccgctcctttttttcggataaaacggcgtatttttttcatttcctgattatgccgaatatattcttcctgcagatttcttcccgcataatccatttccacaggaagctgcatgatcttgtggatctgtgccagagtccggatgctttttaaaatatcgttttcggatctcgtgtcacattcccgtccctcaaaccagatctgtgcagtatatggaacagaatctttgtccctgcttaccagtacgccttccctgtttctgagataggcgtccacaagacagttctgttctttcattttttcaagaagctgctgctgcatggaaagctttttttccgagccatgaaattcccggagtatcaccggacctttttctgtccggcacagaagtgccccccgcaccctgccggagaatgaagctgtaagcccatactgctccagcacgctcaacccataatcatacaaaaaagttcccccctgccttattttacgttctattttatgcagaggggatttttgttattctattcggtttttatgctgtctttttctgctgtttcaagaagtttttcttttgtattaagggttggatctttcagcacacagtcaagaagtctttcgagcagtgctcccagtgctggtccggccggatgtcctgcctttataagatcttttccggaaactgccagggttttcagagatgtacattcacctctttcaaggatcccatgataagcttccgtcacaccgcttaaccgtgccagcttctcctccctcctgtaagtactctgggataaaagatctgccttctgcactttcagatacagtggaaaaagcccttctccgataagattcacagctctccgcacatcctcggcgtccggagtgggacgaagatcatgataccggatcagacgacaggtatttcggatcgttacattatcaaatttcagacggcgcaggatctttcctgccagcttttcgcctaccggtccgtgagtcttaaagtggtctcttccattctcatctgtcttttttacaaccggcttggcaatgtcatgaagaagcatggtgatacgaagaagcctgtcattctcgatctccgtaaggcttttcaggatgtgctcgcctacgctgcagcagtgatggggggtattctgcgctgtttccatacaggcatcaaattccggaagaaattcccgggtaaggcctgtctcccaggctgtccggaggtaatccggatgatcggataccagaagctttacaagctctgtctggatacgttctgcacttacatgttccagatttccggacatttttgtaagggcagccttcgtattttcctccacggtaaatccaagctgtgcggaaaaacgcactgcacggagcatccgaagggcatcctctgtaaaacgttctaccggatcaccaacacaacggatgatcttcctattgatatcctccattccgccaaacagatccaccagtccatgctccggatgataagccatggcgttgatggtaaaatctcttcgcttcagatcttcctcaagacttctggtaaaagtcacggcatccgggtggcgaccgtcatgatattctccgtctacacggtaggttgtcacctcaaagccctctttgcccatcattacagttactgttccatgctggatccccgtatctacagttctgtgaaaaagctccttcacctgctccggaagtgcggaggtagtgatatcccagtccccaggcacccggtccaggatggaatcccggacgcagccgccgactacataagcctcatagccggcttcattgagagtacgcaggatctgttctgctttttgtggtatgttgatcgtcataataactcctcttgatgatcgctgctgtccattcaaaacacgtttatatttcgctgtatcaactccatgtcagcagctgaataatattctgatatgttttccttaacgctattttgacactccccacagctaaagcagggggattcttgcttctcccactactgcattggcaaacaccttacggtactgcaatgtcttacacagtgtccacaagctatatttatactgttcccgtatgccctacggtacagtttttatctttatgcagactgcatctgcagtccttttttcagaatattgatacttgcattcgtatcccggtcatgaaccgcatggcatttgggacactcccagatacgaatgcccagattttttatccgtggatttctgtagccacaacagctgcaggtctgactgctcggatacatcgttggtactctgtgaatttcatttccataccagccagctttatattccagcatttcaaaaaattttgcccaggaaacactcgctatcgattttgacagtttatgattccggatcatccccttaacattcagatcttcaatacagatggtttggttttcacgcaccagcatcgttgactgtttctgcaggaaatcattccgctgattggttactttctcatacactcttgccaccctgatccgctgcttctcgcggttatgggaatctttttgttttcgggaaagcctgcgctgttctcttatgagttttcgcattgagcgttccagatatctgggatttgataccgtatttccattactgtcggagtagaacgctttgatcccgacatcaatccctatcgttccgccagcatttgagcgtggttccggttcaaaatcaacatttaaaaccgcaaaatattttccagccggtgtgtgctcaatgatcacgtgattaatcttttccacttccatcgactgccgtattttaacaaatccaagtttcggaagtttgatatatcttcccacaatacgaatattatctttttgatttaccgttctgtatgactggaaccggttatgtttacttttgaaggttggataggaagcccgtttctcaaagaaattcacaaatccccggtcgagatcccgcaaagactgctgtaatgcaatggaatctgctgctttcagaaaggcaaactcctcttgctttttcagttcagtcagcatggcggaagtctgggaatagccgatcttttccccattttcatagccttccttacgcatggcaagtccccggttgtagatgaaccggcagcatcccagggtctgatggatgaagtttttctgttctctgttcgggtagattctaaatttaattcctttttgcattatcccatcttatccttttgtctctgcgatgttttctggttttcaatatactgttttactgtttccagcggagcaccgcccaccgtcgatacaaaatagctgtttgtccagagagtcggcattttcgttttaagatagggaaattcctgtcttaaaattctggacgtatagcctttaaatgactttacagctttgtggatgccaaactgaggatctacttccaaaagcatatgaacatggtctggcatgatctccatttccagaatgtctacagaaagatttgcagcatactctgtgagcagctccttcagccggacgtccacaccattaattaatacttttcgtctatactttggacaccatactacatggtatttacaggaatagacgacattgttatttaatttatatgttatgttcatatttatattatactatggttcattagttaatacaattactattttgtccatcttcaattacttgcataaattcgatggacgcgtcttatatccccatagccgaagcaaggggttttacgacgcattggataaaaacagcggagcatattttgccccgccgctgtttctgcaatataaattatattttagtatgcgcgtccccagtaaaccatcttcttagccggttttccgcaacatacgcaaacgtcgcttaactgctcctgctcaaatggcatacatctggatgttgcctggaaatcttccttgatcttgtcctcacatgcacgatcaccgcaccacatagctttgatgaatcccggtttgctgttgatgatctcaccgaactcctcataattctttgctacgtaagtatgtgcctctctgtgtgcacgtgcgcgctccagcatatcatgctgaatggtatccagaagctcttttaccttatctgcaagctcctcgaaggatactgtgtatttctcacgggtatctcttctgcagagaactgcctggccgttttcgatatccttcgggccacattccacacgaagcgggataccacgcatctcctgctcagcaaacttgaatcccgggctcttgtctgtagcgtcaacctttgcacggatgcctgctgccttcagtgctgcaagaagctcatcagccttctccataacgccctctttacgctgctggatcgggatgatcacagtctgtaccggagcgatcctcggaggaagaacaagtccgctgttatcaccgtgaaccatgatgattgcaccgatcatacgtgttgtcattccccaggatgtctggtgaacatatttcagagtgttatctttatctgtgtactgaatcccgaatgctttggcaaaaccatctccaaagttatggcttgtaccggactggagagcttttccgtcatgcatcagagactcgattgtgtaagtagcctcagcacctgcaaatttctccttgtctgtcttctggccttttacaaccgggatcgcaagaacttcctcacagaagtctgcatagatgttcagcatctggatggtacgctgctctgcttcctcggctgttgcatgtgctgtatgtccctcctgccacaggaactctctggaacgaaggaacggacgtgttgtcttctcccagcggacaacggaacaccactgattgtataccttcggaaggtctctgtgggactggatctctttctggtagaaatcgcagaacagagtctcagaagtcgggcgcacgcaaagtctctcctgaagcggatcaaggccgccatgagtcacccatgcaacctccggagcaaaaccttctacatgatccttctctttatcaagaagagactccgggataaagatcggcatgtaaacgttctctacaccagtctctttaaatctgcggtcaagctcatgctggatattctcccagatcgcataacctgcaggtttgatcgccatacagcccttaacacttgtatagccacaaagctcagccttcttaacaacgtctgtataccactgagcaaaatcctcatccatagatgtgatggcctgtactaatttcttttcttttgccatgataaatctcctttttcttgtgatctgttacatattgccggctgtcagacagccaaggcaatccggaatcctttctgcttactcttccgtcctataaaccgtacactatatttacagtcccgttttacggacaaaaaaataagccctccgaatccctcacaagggaccgaatgacttcggcggtaccaccccagttaacagccagaaaagctgttctctcaacacccgttaacgccggaaacacacgccacgcttcaatcacgcagagctccgaggccggttccacagttcacgcacaggatccttccaccaaagcagatccctctctgagataattccctgtgtactattctcatcatcgccgtatctttgatatattttaggcgaaaaccgcctcaaagtcaaccccaaaccaaaaaatataacaagtctctctgctatgagttactgctcactccgttctcagtaacacgcttcgcgatgcacagaatttatgctaatcgcataaattcgcgcggtatgtctcgggttttctgtgaccttcgctcacaaaaaacacctcgcggaacattgccagtgaacagtaactgctatgctcctattccttcacagacacagccggcatctccagatacctgttcagatcttctgtgagaatatggagcttagttctggtatcctgttcctggtacgtcagccggcctgcgatcctgttgatataatcctcttcttcgatgatctcacaggtctcaggaaaattgatatcataatactgtgcaagataagatacccagtaatccaccggcacatgtctgtctgcggataacacggattctcttctgagacaggactcccacactgccggtgagatcaacccttctcctgcaacctcttctgatacaccaagcatggcctctattgacgcctccagctttactctgcagttatccagcttatcggcatctcgtatcagttttgcatggaaaagtgttcttgcatcgtggattccttccagtttgaaatcactgtgcttccgaattgctgcatcgatcagctcatcaaatttatcatcctccacaaaacgccggatcagcttctcctccccgaagagaagttctgcaccgaacacggcatgatccatggttcccggctcaaagctgtgaaatctacggatctgctcaaaacggccaatatcatgaagcagaccgatcagctccgcaagttccacatcttcaccggaacattccatttttctggcgatctctcctgcgtatttcaccacaccataggtatgtacgatcttcagacagatctgttcatcctcccggtcgtattcatccagatatttttcgaattcctgttttgcatgtgcaatgtcgatcattctgccacaccccttcttcttttgttcattctgtagccctgtaaacactctgtatttattatatcgaaggtctctgacaaattctactgtatttcccggaattttaaatcttctcgctgctgccgaatgacttccctgctcaaggagccaattatccccttcgtttccggaaatgatatccggaacaacatgggcaacaccgccctcctctgtctggtctgcctccacatcacggagccattttcggtagaaggaataggtattttcaaggaagcatgccgtacggcagaagatctgtgcatcaccggtccatccaaaacgctcatctccctgtggtgtctcaaaaatattttttggttttacttcctccataagggaaacctgtccggtaaaccgttttttccggtttcatctattcatactttacgatttctttccgcagccgcttcatgatccgcttttccaggcgggaaatgtaggattgcgaaattcctaaaagatccgctacctccttctgtgttttctcgcttccttcccggtttccgatgccgaatcgcagacggatgatcatctgttcccgctttgtcagtttgctgattgcttttccgagaagtgcgatctccacttcatcttccagacgtctggaaatcacatcgtcatccgttcccaggatatccgaaagcagcagctcatttccatcccagtccacattcagcggctcatcaatggaaacctccatctttgttttgctgtttctcctcagatacatcaggatctcattttcgatacatcgtgatgcataggtagcaagcttgatattttttaccggatcaaaggtattgatagcctttatgagccctatggttccgatggagatcagatcctccacacctacccctgtattatcaaatttctttgcaatataaaccaccagccgtagattatgctcgatcagaaccgactttccctctttttccttttctgttcccaacatttcgatcacttcagcctcccgttccgctgacaacggcgccggaaggatatcatttccaccaatataaaaaacctctcccggacgattgaacataaatttccggatcacctgaaacggataggatcttgcagctgctctgttcataacataagcccccttctcaatttaatagtctggaattcaaaagtatctcgtactcttctcccaaagctgagggctcggatgttatagcaagcaccggttttcctacatgtaccaccctttcgggagtctggatcagaagttcatcaaggatcactgccagcagcagtcctttttttccatctgcggtatgacagctcagaaaatgcggctgcagactgacaaatcctgtattttccagttcctctggtttatctttaatatccatcagttttttcacctgctctttcgatatcaggcttcccaaaagttcctgtttgatgatcgataccggctgttttttcacaggatccataaggagatttccggtatcataaaagccgtatgtctgctgcagcttcccctgatatttcaaagtgaccggaaaaatatttcttcttccaaaccggaaggtctcggtcacacatcccagagtataaagtgtgccataaatccctgccagaaaaagcagaaatattttcaccgtcatggttctttccgtttccagtgcctgatagatcccgccaaccacaaaagctgtgaaatacagagccagaatggtttttacaagaaggccgccttttttcagtcgaaaagcaaacgacgccataaaaaaagcgcagccgccatggatcagtacagcggcaggaaaaatgatcttaaaaggtacacatacaagcaggcaggatacaaaagatccaaaggcagcggatatcacacatcttctgcgtttcccgtcaagatgcagaaattttcccacaagtcttaaaagcatgtaatccataaggaaattcgtcataaaaacgatatctatgtatatcctctgatacataagcttcccccactgctgtttcgtctgccatcgattctcaactttggtaagtgtatttattatagggcaggctctttgcatattttgtcaaatccggatgtcgattcttctaacttatcgggtcgtttctgtctgtctcgacatttatagattttttctatgaatcggcgacaaaaatgtataaatttccgtacaatatttgtatttgttgattttcgcactttatagtgctaaaatattttttattatatttcgtaaagaaattctattatatgagatacaggagggaatcgaacaatgatcaatattaccggacataccgggcttaccggccttctgggaagccccgtggcacacagcgtatcacctttaatgcacaatgaggcattccgttatcttggacttgattatgtgtatctctgttttgatgtaacagaggagacccttccccaggctgtggaaggactgaaagcctgtgggatcaagggctttaacctgaccatgccaaacaagaataagatcgtggagcttctggacgagctttctcccactgcccagctgattggagcggtaaataccgtacgcaacgacaatggaaaattaaaggggtttaatactgatggttatggatttacccagtctgccagagatgccggctgtgatgtaaaggggcgcactatcaccgttatgggtgtcggcggtgccggaatggcgatctgcggccagtccgccctggagggtgcaaaaaagatccatgtttttgcacgtcctaccagccgttactgggaacgtgctgctgccatggcagaaaaaatgtctcatatgacagaatgtgagatgatccttcatgagatggatgatcacactgcgctgaaggacgcactggaggaaagcaatctcctcatcaatgcaacttctgtgggaatggttccggatgtgacaggcaccgtgatcccggacaaggctctgttccatccggagcttaccgtagccgatgttgtatatgagccaagagaaacaagacttctcagggaagcccgggaagccggatgtccgacctttaacggaatgtacatgctgctccaccagggtgtaaaggctttccacatctggaccggactagacatgccggttgagctcgtgagggagaaatattttaaataaaaaatatccggcaatactgaccgcctccgcatcacagcgtggtctcaatattgccggatcaaaaataaaggcggcccgcctatcacacgggtcgccttttatttatccgtcaatcatctgttttgtttatttcttctcttcctgaacctcgatcttacggatcgtcttgttcttgatctcttctttgatgaagtcaatgaactcaccaagctctttcattccctcatcgccaagatagcggcttcttacggaaaccttaccctcttcttcctcttttgcaccaacgataagcatgtaaggtactctctcaagacgtgcctcacggatcttgtatcccatcttctcggaacgtccgtctacagagcagcggattcctgcttctctcatctgagcttcaaccttctgtgcataatcgttatacttctcggagatcgggatcacacgaacctgctccgggcagagccatgtcgggaacattcctgcgtatttctcaatgagccatgccagtgttctctcatagcatcccatggatgtacggtggatgatgtacggacgctgtttgtcgccattctcatcgatatagtacatatcaaactgctctgcgagaagtgcatcccactggatcgtgatcattgtgtcttcttttccgtatacgttctttgcgttgatatcaaccttcggtccgtagaaagcagcctcgcccacatcctctgtgaatggaatgttcagctcctcaagcatctggcggatatggccttctgtctcttcccatacctccggctcaccgatgtatttctctttgtttgtcggatcccatttggaaagatgataggttacatcttcctcaacaccaagtacctgcagacagtactgggcaagtgcgatacagtctttgaactcttttaccatctggtccggtcttacgatcagatgtccctcggaaatagtaaactgacgaactcgtgtcaggccatgcatctctccggaatcctcattacggaacagtgtggaggtctcgccgagacggatcggcagatcacggtagctgtgctgctctgctttgtatacatagtactggaacggacatgtcatcggacgaagtgcataaacctctttgtccttctcctcatcaccaagtacgaacataccatctttgtaatgatcccagtgtccggagatcttgtaaagatcgctctttgccataagaggagtttttgttcttacgtatccacgctttgtctcctcatcctcgatccagcgctgaagctcctgcatcatgatcacaccgtttggcatgataagcggaagtccctgtccgatcacatctacagttgtgaagatcttcatctcacggccaagcttgttatgatcacgtctctttgcttcttccatctgctccagatgctctttcagctcatcctttgtagcataggctgttccgtagatacgtgtaagcattgcgttcttctcactgcctctccagtatgcgctggaagaagaaagaagtttgaatgccttgatgccttttacactcatcaggtgtgggcctgcacagaggtctgtccagtctccctgtgaatagaaggaaatctcttctccctccggaagatcctcgatcagctcaaccttgtatggctcatttttctctttaaagtatgcgatggcatcctcacgggattttgtaaaacgctcgatctttgcgccttttttgatgatctttttcatctctttctcaatggcgtcaagatcctcacgtgaaaatggatcgtggtcgaaatcatagtagaagcctgtatcaatggatggtccgatggcaacctttgcctccgggtataagttctgtacagcctgtgccattacgtgagatgctgtatgacggagaactgcaaggcccttctcgtctttcgctgtaaggatattcagctcacagtcgctgtcaagaactgtacgaagatctacgacctctccgtttacttctcctgcacatgcagcacgtgcaaggccttcgctgatgtcatatgcgatatcgatcacagcttttgcttctgcatattctttttttgagccgtcttttaatgtaatgatcattgttgtttctcctttcatttgaaatgaagtttctatggtacacagtatgtgtctgcttttgcaagagattctgcaataaaaaaatccctcacagtacatcacatactgtaagggacgagttcattcattctcgcggttccaccctgcttgctctgctgcccggtcatgccaggatgcaaagcctctcaattatgatgataacggaatcaccggaccggattggggccactcggaggtagtcttcggctgtttcccgataagatgtttccagcacttcacatctctctctgtaacgtttcacagcttactcgtctcgtcaacgtgttttttatttctttttctgtggttcattataagcgcagtatttttatttgtcaacgcatgttgacaaaatttttgagatttctcttctcgcacagatctacagatttcccatgagtttgtctttgataatagccaaaatctcacggggaatgtagataaaaagacgccagcttcgatacctggaaggtaccatggccacttcccggaatccacattttcttgcaatggctgctcctctccatacatgaaaattgttcgtcaccacgcctacagaacagtctgtggttccgatctttctgcaactgaattccaaattctctttcgtactggtagattcctcttcccgtatcagtctgtccccgtttattccgtgaccggtaagataacgatacatggcctctgcctcggaaatgttttctccatcgccttttcctccggatagcactgccttcgtacccggattttcttcaagataaagaagagcccttctggctcgttccagaagggcaagtgtcatccgtgttccgtccacatgggcacctaacacgataatgtaatccagattcttctttacgctcattatcttccgcagcagtgtttgtatttcttgccgcttccgcatgggcacggatcgtttcttccgaccttgtgcggtttcacaactgtgccggatttcttctgctccatgtagagggttttctttttctcttctgtgaagatcttgtcccactgaggaaggttgtaaagccagtcagccttggcatctaccatgttcttatagagtgcctctttatcaaatgcaaggtttaccttggtatcctcatccatagtctcgatcgggttcggaaccttcagactgtcattgattccgtcaaggaaaccaaccatagtcataacgtcctgaccgtatttctcagcaagctcttttacagttccggaaacagtctcatccgggttctcaagaagctgctcataaatattcttctcaatgttaaaataatttgcccagaagcgctgaagcttattcttatctgcattctgattataagcaatggaacgccactgctcaagaattgtcatatcgctcattgtctgatcctcttttccaaaattttagataaataagacggagatttatattccgcttcgcaatttctatttattatatcatcttttggcgaagaaatcaaatacatctgtttcatatccgagttattttatcacactgtgatttagttcaagcagatattcgcgcccccgcagaggacttacttgcttcagttaaaatattttctgagaagataagtcggagtgcagctccatgcgtgacagtagctgttgacaatgctgcttccatatggagattctgcaggattttccggattataaagctcccagaatgtatccgcaccgtggcttatcattccgccccagtaatatttcatatattccattgcctggtcttttttaccacacatcagaagtgcttccacaaaatgatggttcatatatggagaaaccattcctttttccggtttcagttccaccagacgatccagtatttctgctccttcttcgccgctgactgcttccgccaggatcatccatacctgacttgctcatgatataaatggcaatatcgtgctttccaagcattaccgctatacccctgtttttccccatgaacatgaattttttgagatcctctgtctgtatgacggaactgcccacactgcgatacaaaggatcgaacacactttgcataccggagatatctgtatcatcccaccgcataccactcacagtgtggggatctttgatgacagtgttgcttttaatattctgggccatgctgctgcgttttcacaaaaatgatattgaatccatccttacaaaggacagcaccggaaattctgtaacggaaatcctcaactacctgaaccgtcactaccagagcgttaccttacatgaagctgcaaagcattttggctatagtacttcccacctcagtaccctgatcaaggaaagtaccggacggacatttttacagatcatccgggatatcaagctgaaccaggcatgtcatgctctgcgtgaaacctctctcagcaatcttgcgatctgtgaacttgtagggtatgaaagtccggagcatttcatgcgtatttttaaaaaaacatatggaatgactcccggtgaataccggaagaagaacagggaataaaagattacaagatcttatatattttctgtataacagatgccgttccgggagatacttatcatatcctcccctttagaatgcagagggcttcgcgatggtgcaggccctctgcgtttctcttttcacactgaaggtcatttcacaccaagcttctcaagcgccttcgccgcctgcttcaaattctcaaactggatggtatggataccggcttttccggctccctcacagttcacggcacgatcatccaaaaataccgatttctccggtttcaggctgtaacgcttcagaagtgttttgtaaatatccacctcaggcttgatctgctgcacatcacaggaaaataccactccgtccatatatttcagaaaagacatatcctgctttgtacgatccagcatataagttccgtagttggaaaggacatagagatgatatccctgatttttgagatatttcacccaggtttccgcataatcatacagatgcatacactccggatcacgtcgtaccacctcacggatatctgcttcatattccggtgcactttccacaaatttatctacataccaggactcctcatgctgtccacggtcctgttcctcccagatcgggttgcgaaatactgcatctgcgattttctgatacttttcttccgggaagtcatagctccgaagatactcttcccagtcatagcccatcagcacatttcccacatcaaaaataatattctcgatcatacggttttcatcctctctcggcttcttatttccccagatccgatacgccatccagaaaacatacgctacgatcggtaccagaactgctgccgcaaaagccccccggaacaaagcctgggcgttttcactgcttccccaggcaaatgccattggaaggcagaatataagaagtaatatgacaacacctgcaagtgctgcgattcttttaaaatttttcattgaacttcctttcacatgatacatccgctattctatctgttattttaactgaatatctctttgaaccaaaagggcgccggagaaattcttccccggcgcttcctgttgtcataatcctgatactgtaaaaataattatctataaatgatgtcgtttcttcctggtccgttagagatcattgtgatcgggaatccaatatgtttttctacgaactctacatattttctgcagttctccggaagatcctcatattttttgattccacggatatcgcatttccatcccggaagcttctcaataaccggttttgctttctcaagctgcacagttgtcgggaattctgttgtcacctctccgtcgatctcatagcctgtgcaaaccgggatctcatccagatatcccagaacatccagtactgtaaaagcaacgtctgtagctccctggagacggcatccgtatttggatgcaacacagtcgaaccatcccatacgtctcggacggcctgtagtagcaccgaactcaccaccgtcaccgccacgttttctcagctcatctgcttcctcgccgaagatttcagaaacgaatgcacctgctccaactgcactggagtaagctttgcatacggttacgaccttcttgatctcatatggaggcaggcctgcaccgatagcaccataagcagccagtgtggaagaggatgtaaccatcggatagattccgtgatccgggtctttcagagttccgagctgtccctcaagaagaacctgttttccctctttcagtgcattccagagatagagagatacgtcgcatacgtatggctcaaccatcttcttgtattccatcagctcattcatgatgtcttccggtttcagaagaggcttatgatagagatgctcaagtgttacgttcttggtctcgcagatacgtacaaccttctctttcagtgcttcctcatcaaaaagctcacttacctggaagccgatctttgcatatttgtcagaatagaacggagcgattccggattttgtggaaccgaaagccttgcctccaagacgctcctcttcatactgatcgaacagaatgtggtaagacattaccatctgtgctctgttggagatcaggatcttcggtgccggtactccacggcctactacttcgttgtactccttgaagaataccggaatgttcagtgcaacaccgtttccgatgacactggtcgtatgtccgtaaaacacacctgacggaagtgtatgaagtgcgaatttaccgtaatcatttacgatggtgtggcccgcattggctccaccctgaaatcttacgatgatatcggctttctcagcaagcatatctgtgatcttgcctttaccttcatctccccagtttgctcctactactgcagttaccataacacagttcctccttgtgtctttctctattattcggaacggcatgttctctgcctgtaatacacagagacacgtcattcctgtctgtgttcatttcttaatgtttataacatcttggaattatacgttgatctcaaccttaacgccaagcagatccttatgtgcatccagaaccggctgtaccacattggcgataaatgcctctgtctgctctttggcgcgtcctgtatatctggacggatccatggatttctgaagatcctcaagagtcaggttaaatgccggatctgctgcgatcagctcaagaagattgttatctttaccctctaccttcacgttcttgcctgcttccatggaaagctcacggatacgctcatgaagctcctgacggtctccgcctgccttaactgcatccatcatgatattctcagttgccataaatggaagctcagacatcaatctcttctcgataaccttcggataaacaaccagtccgtctacaacattgaggcagagatccaggattccgtcgatcgcaaggaatccttccggaacgctgagacgcttgtttgcagagtcgtccagagttctctcaaaccactgtgttgcagatgtgatcgccgggttcagtgcatcgatcatcacatatctggacagggaagcgattctctcacttctcatcggatttctcttatatgccatagcggaagatccgatctgggatttctcaaatggctcctctacttctttcagatgctgaagaagacggatatcgttggacatcttatgtgcacttgcagcgattcccgcaaggatattcagcacacgggtatcaacctttctggaataggtctgtccggaaaccggatagcaggatctgaatcccatcttctctgcgatcatcggatcgatcttgtcgatggtctcctgatccccgtcaaaaagttccaggaagctagcctgtgtaccggttgttcccttggagccaagaagcttcatagtgcttaatacatactcaaggtcctcaagatccatcaggaattcctgagtccagagagttgctctcttacctacggttgtcggctgtgccggctggaaatgagtaaacgccagagtcggctgatccttatactgtgcagcaaacttggaaagctcagcgatcacgttcacaagtttcttgcggacaagtttcagtgcctctgtcataacgatgatatccgtattatctcctacataacaggaggtcgctcccagatggatgataccttttgccttcgggcactgtacaccaaacgcatacacgtgagacattacatcatggcgaacctgacgttcacgctccttagccacatcatagttgatatcatccgcatgagctttcatctcgtcaatctgctcctgggtgatgttaaggccaagctcacgttccgtctcagcaagtgcgatccacagctttctccatgtgcggaatttcatgtccggggaaaaaatgtactgcatctctttgcttgcgtaccgctctgacagcgggcttacatatctgtctgtattcattattatcctcctgattacatacatccgggccggaatggcgaatgatccgttatctgcccgaatctggttaattcacgcctcttgaaattatataacattgcctctttaaaagcaaccgtttgttactccataccctgatggaattttcccaaaaattccttcattctgccattttcggaagaaaatacctcctgcggcgttccctccactgcgatcacacccttatccataaagatgatacggtcggaaatatctcttgcaaaattcatttcatgagtaacgatcaccatggtaatatgctcctgagcaagatccttgataaccttcaggatctcaccggtcagctccgggtcaagtgcagatgtaggttcatcaaaaaacaggatcttcggattcatacagagcgcacgggcaatggaaactcgctgctgctgtcctccggaaagctgaaaaggatatgccttctccttgtctgcaaggcccattttcttaagaaggcttcttgcctgggcgtaaacctcatctttctttctcttctgcaccttcagaggtgcatccactatatttttcagtacggaaaaatgcggaaacagattgaactgctggaacaccagtcccacatcaccgtttttgatgatctcgccgctgtccggcgtctcaagtcctgtggcacaacgcaggatggttgacttgccggaaccggaaggaccgatgatacttaaaacttctccctcttccacgtcaagagagatatctttgagaacttccagtccgtcaaagctttttttgatatgtttcatttcaaataatttcatattttatactctccattccggttagcggtagtaattcatacttttctcaaccttctgcatcacaacagccacgatcaggttgaacacataataaaatatcgcagcgatcacaaatggcatcattgttgtctgtgcacttgcgatctgcttggcaatggtaaacatctccgcaactgccacaacaaacgcaagggaagtatccttgaccagcgtaatgacctcattcgtaatagacggcaaaatcctcttgatcacctgtggaaggatgatgcggaaaaatgtctgtaccttattgtatccaaggatttttgcagcttcatactgtcccaccggcatggattcaatgccgccgcgatagatttctgcaaagtaagctgcatagttgatggcaaatgcgataaatacagcgatcagactatatcccatggaaatacggatcccgaagataaaataagggccgaaatatacaaccatcagctgcagcatcagcggcgttcctctcatgatggatatgtacccggatacaatggtacggatcactttgtttctggacattctgccaaaacagatcagaagtcccagcggcagagaaaacagcaaggttataaaaaagatctcaatagagaccagcattcctcctgccagctgctgaagcattacactaaaactcatttttttcctcctggttcggagtatcagtcccatttatcggactgatacctgtaattcctgtaaacaacaggaaatgagcgtgtacggcagctctttctgcgccgaagcaccctcatttcctttttatgcggaagcttcaaaagcttctgctatgtttcttatttctactgctgttggatagcttaaaaaatatcttcacagcttttactgtaccggatctgtaccggatcatttggattcagaatcggtttctttctctgtgctgtctgcactttcttctgtgtcagcttctgctgaatcagaattctctgtcttatccttgtcctcgctgatgcagagcatgctcttatccagttcatacttatctgcaagcttgtcaacctcaccggactcgtcaagcttcttgacctcatcccatacgagatccttcagctcatcatttcccttcttgaatccgatgccatactgctcgttctggatcggctcgtcaaggatcacatatttatccttgcctctctgggaaagctgatagttagcaacaccaatatcaacagcaacagcgtctgcagctccggaatcaatattcataaatgcagtgttgtagtccggattctctgtaagagatgcaaagctgtccttcaggtccttattgtcatcgttgttcaatgcgtccagtgcagcggatgcagcctgtacaactacgttcttgcccttaagatccgcaagcttctcaatttcagaatccttggcaactacgatcacctgctcattgttgatgtatggatcactccatgtatagtcatcctcacgtccgttgatagtaaatccattccatatacagtcgatcgttccggagttcagctccatatccttggaatcccagttgataggcttcttaacaagttcccagccaagattatcacatacttcctgggcaaggtcaaggtcaaatcctacatattctccgttatcatccttatatccgaacggaggatattcagcatcaaatcctacgatcagggtcttatcctcaacacctgcctgtacactcactcctgttaccatcattcctattgtcatcgctgccgccattactactgcaactgttcttttcttcatggtcattctccttttttcggttatctctttatcacatggtcactctaccacgcgaaagcgtatggttatagtaacatacccaaaaggagctgtcaagagcaaaccttctgctctgccagataatctttgtatttctttctggccgttttcagatatgttctggaaattgggatttccgtctgtccgaccacaaaactgttcttcttaagtgaagttaccttctccatgttgatacaaaagctctgatgacatctcagaaagctgctgtctgacagctgtcccgaaaaatcccccagcctggctctgcagctgatcttttttccatcggtaagatgaaatgtcacactgtgaagactactggatatatatgccagatgatcgtgctgcagtgtataaacctgtttcctgtagcgaaaatacagcgctcttccgccttcacgcctgcatacctccaggatatgtaccagaacatgttccagttctccactttcaaccggtttgaccagatagttataggcaaacacttcaaatgcttctttatagaatttttcattctctgccaccagcacaaccgggatataatgtcctttcaggcgcattgtccgtacagtttccagactcctgccctgatcaccatccagccccagaaatatcagatcgcagatcttgtgtccctctgccagtcctttcagaagactctctctggtccgatacagaaggagctctgcatcggggaccagtgtggaaagctgcctgtacagcttctgtgcatcctttcgtatttcatcacatatcgcgatcgtcatcactgccattgccgtgttttcctccctcatgctctttctgatattaacattttattttcaaagaaagacctgcgcaatatgtgcttctaattgtgccttgtttttttgcaaattattgtaattcatgatctgttttcgtataataatgtcatataagcaccaaaaggagtactactatgtctgatttcagcaacaaatgccgggaatacctaaaggatacaggagaaaacgtttatcagttatctgcttcttcgggacttgaccgtacctcgctacaacgtatgatcacagggaaacgtcttcccggtattgattttgtgcgccagttctgcgattccctccggatcaatccttcccagcgcagggaactgatggaattatataaaatagaaaaaatcggaaaagaaatatattacaaccgcaaatatatacaggagcttctgggtgttatcagctcccagcaggtcatttcccgggagggttttctcaggcttccatcctttcccttttaccgtggaactttttctcttgatgtggaaaagaaggtcctgagcctttttgaggacatcctgtcttccggttcttctgaaacgatccgtaccaaccttccggccaactgccggcttcttgtacagatcttttcccatctttatcccaaatatgagaaactgccaccggtgatccagatcctgccgcttcaccagaacccgtccgcctcaccggattacaacatgaatctggaaacctttctctgcacactccttccgatcctgtcaggttttgtgggctaccagccatattattactatactcagacaggccgagagttttccagctatgaactgtttccttttttcttactcactgaaaaaaagctgctgctgttatcctcggatatgatgacctgtatttttactgaaaatccggaagcgatccacgcatatcaacaggaattccaacgggctcttgagaattccagccaattcttcctgcagtcggattctccgaacaggatccttaatatctttggttctatcatgcagacaaagatctcaacaaattttgcactggaatctcatccctgccttgcactgatgtcctatggtccgggctttattcagtcattgtttgataacagggatatcgatctttccgatccggtctatacccagctggcagcggttctgaaccagacttccttttcttttacagaagctgccttttcctgcaattattttacactgagcgggatccgaaaatttgcccgtaccggactccttgacggaccttattcctaccatcagacccctcttccgaaagaagaacgaaaaaaagccctcaagcatcttcttgacacagatatgggacatgaaaaatgcaggatcctgaagccttccatacttcctgaaaccgggatccatctggaagttctgtctgactattccgtttttctctgctttctttccgaaaaagatacttttctctgtatctatctgaaagagaccagtatcggacaggccctgaatgattacctctgttccctgtctgaggaagaatccgtatatacaaaaaaagaagcccggcagatcctgctgggacttcttgaacagctttaagagccggtacttctgtgatattctcttgtgagatcctccaggatcctgtcggtttctccggatgcgatatgctgctccgggagaccggcaaagcttttcagagcctggtctatttcctgccttaccatttcatctgtcttcagatcttcctgtcgtttcctgtattcttcttcactgtgaacactgcggtaggccagaagataaaccttcatcgctttctctgaatgattctccttccatgctttccaaaagcaatccagcgccttatccatctggaacaggtaactgtatgcgcatccctgattatgcaggatcctttcacgcatctctccagtgatttctttcccgccatgctccagaagcttctgataaacacggagtgcattcacatacatccgattctccatcagcgcatcacctttacgtttctcccgtatttcttcaggttcacgttttctggcttcaatgcgcccgtttaaggtcttaagctcttcataagccagataattgatctctttaaatatcggatacagtacttcttcaagtccggcctctcttccaatataaggtttcagcttggccgcaagcttcggaagctccagttcttcctccagccaggtacagagcttactgctgatcaatgagctgtccacaagataaagattgttataaagataatagcagagttcttctatagaatagatattggtactgatattttcaatataaaacggcttctctgccttttttacctgacataaaatatatccgctcatgcctgcttcctttcttcctgctcatcccatcgtaccagttccctccagatcttcccactggaaggatacatttcgccaaagcccagatcctctactgtaatctcacagtctctcggcgatacgtatttcagcgtgagggaaagccttgaagtccgattaggccgctttggcagaccctcaagtgccatggccacacgtttcttctcggtttcttccggaatacttactacaaataccagttcactggtatcatccaggatcagctcgcaggatgcactgcattcataccagttgctgccgctttcgatcagcggatagtaagccggagagcccatcacccgcatatccattcctacgtccgcagccaccagcgaatcgcttaaatagcggtaacctttgagttttttatcctccagcctgtccttaccggctatgcaggctccctttgcaaaaagattgtttccgtaaaaaaccttccgtccctgatgacataggagctttacagactgctgtgcccactgctggtcaaatccttctcccgtgatctgcacactggagaagagctcttttccgagagttttactgataaaacggtaaaattccacatcacggatctcttcttccggttcaagctttgtactgaccggatcctccagttttacaagcaccggtctggaagagccgttgatggtcagcttccggaaggttaccgtatcgcctgcaaaggcataccagcctacacttcgattccaggtttcccgtttctgtcccagcgcataataataaaagctctcgccatagtccataagcatatatttctcacgggaaaaacctgcaagactgcaggccttctgataattccgtacctgaagtgtactaagctccggcgatgtgatacaaaggcaccgggtattctttacgatatcctggattcccagaaatttcaggattccccttagaaaatgtgccagaagctctgccggctctttttcctctcctgccacctggatcttttcttccttctgacagatatcataaatatttccgatcatgatcccgcccttttccctggcaaaatactctgcttccaggcctacgcagtaatcaccgtgatcggtacgatagcagatacagcccggagcttcgtactgactggctcctaccttcatggaaagagaacgggcttcttctgcttttctgtcataataacagatctgtgtgtattcttttccaatatcaattcctatgatcaagtcacgaatttcattcatctttccggttccttctctatgacaaacatttcattaacgtactgttcctgccggagatactgtgccagcttctccttcacttccgtgtctttctccagtttccttgcacagagtatctgattgatcagctgatatttgctggatgcctggtcattactctggttcatggtcagtattttttcttccgttttgtgtacaccagtttcatcttctgtctggaaataatatcgcagggtctctccataaaacaatgtaaatgctctggcaaaaattccctcatagatatttttgagcggttcacttttatagtccggtacagttccaagacctgtatccagggaataatacagtgtgaccgaagcctccggtgaagtatgatactctacaaaagtcttatcatccagctgatacggtcgcaggatactctgatccagattccgaaaaagctcaaatagcattccgtcctttacacaggaagagaggattttttcctccatttccagattttcttcatcagaagttttttcttcggaaagcagcttcagaagggccaggtcacagatccggtctccgggccactccttttctctgcgatttttcagatactccttaagtccaggcatctccggcatttcttttacaaacattccgtaagacatcagagtcagatacgcaccgatcacactctcttttccggaatgacggatatatgctttcaggatatccgcaccctctggccggtaatcccagttaaacatcagaagagaaaggatcctctcctccagattataggtatccatctcaaacccacaggcacttttccagatatccagaagttcatccacaggtccaaaccggaatttcatcagatacatgaggatcacttcatcatagattccctgtcggtatacatgagaggaaagtgcgatcagctcttcgtcttccgcgcagtcacagcggatgatcatacggcttaccagcttcagaagcgcacgctcctctactccttcaaatccaaatgcttccaccacgctcatagcctgcggaaacagtccccgctggatcaggatctccagaagggttttccggtcgaccatggcatattcccgataatccatcatctccagacaggcatccagatcttctccctgcacgtgatcccgataataatccaggatctttttgcggatcagcctcttatattcatcggtaaacgccggtgaaaggaccagtttctgaaaaattcccagattcttacgactgatctcctgaccctgacagtaatacaaaagcacagccggttcatccgcccctttttccaacactgccagaaccatctcacgatcatcaaaaagtggtgtcagattataatctaccgtagcagcataacgtctctgtttttcatcctgaaatacaacggccgcatcttcgctgcagatccttgggtaagcgatcccatggatacacggatagatttcttcctgtttcatctgtctgtgacggacgatcacactgcggaccttcggatcatccgtatacagccggcaggtaaacattctggaggcgatcacctgcgctttttcgctgtccgatggttcccgcatgaattcctgataaacagcggcataattttcattcatccggccttcccgtaacttacggaaagcaaattcctccatgctttcacgataactttcgtatgtctgtggatcacgttccttccctgcaatgatgcatgcatacagataggcacgcttggaatcaccgagagtattgttgttataggtaaaatacatcaaaagcggtttcggcaggactctccgataagaagtatccagtgtttccacataatattcatacagccgtgtgatccggatcccgcggtccacggcagcggaaaaccactgaaaatattccggttttcttggatttcccttcataatatatttacagatagcttccacggtatcatccgacggaaaggcttcacatcccatggccatagcacggtacagactttcgttaaaagctttctcataaccggaaagatatgccaggcgcatgaccagctcttccgtcagcatctgttcttttcctgcaaaaaggaatacctgggcccagaacccattgattcgatgcagcagagacatatctgcacaaatactgttccatgcttccagatacagaaaaggacttgtacatccccgctcaaaaagttcctccatcagaaagatcttttttgacggagaaagcgtatgatccatttcaaataccagtttcagaaggataaagctgtcttccttctgcatctggaaattctgtaccttgcggagggcctgttccttatcccggtacagcccggtctgtgtacacagatacagataaatccctgccagttccagttcattgtgatgaaaggatttattctgataacgctcaaggatttctgaagcctggtcatcttctccttccagatgaagaagataggcttccagaagctgatattccggatatttcagtccgttttcgcccatacggtcaagcttctcatgagtagaggctgtccaggcctgaaaatctgttcttttacagagatatcccaggtattccttcatcagagatatccggtactgtttttccagaagatccaggttcacggcactctcagttcctctggatgcaagaacgtgatataccagtttctggtatggggtttttacaatgatctcgccgtactgatttccttttccaagtttttcctggcggatcacatagtttatttcacaggtacttccgataaaatcctcttctgtgaccacatgcttgcctgcctccagaaaatccccgtttacctcaatatctgcccgcaagtgtccccatccgctcctgtggatataaagggattcctgaacagattcactgacatcataaaaaccggcctcttctctgttcagactcaatgtcaccttttccttggcaccggctgcgatcagaaattcctccagatgctgataggtcaccggctgctgtgacattcctgcataaagagaacggatcttctcactctgatcactcaggatcagggaaaaatgtcgttctgtaaagatccggtaagcctcatggaaatcttcctttgcaatgtgcaggaattcttccagagaagctacctttctgcctgcactcttcacctcttccgtctgtacctgtacagtgaacggcagcttatattctccgatactggtagtaaaacacagccagccttcaaagctctctcccggcctcattccctctgcatctaccccataaggcatgcgcactgtggttccggaaaagcggtcaaatccgggcaccagtctccggtcagatgaagtcacaaagccactgatcctgcggttgtcatcggtaccgaaataaatctcatcctttgtagtctctcctgccttcagcgtagcgaaaatacggtcctgtgaaaacagaagcccaggctgttcataaataaattttccgttaagaagctgttctatcctctttttcaaaatatatactcctcatcaatatacactgattgttgtcactcgtattttatgattatacaccagatcagaatgtggcgcaacaggtgttcgcctctgtcctttttataaagtttctgttggaaaagcacgaaaagcacgtccggctcataagctataaggaaatcccctttgaggtgaacccttgaaaacctttctgaaaccgctttcttttgcggaagagcagttctatcttctacagctccaaaggggcgatccggaagcaaaaaatatccttatcgaacacaatctccgcctcgtagcacatgttgcaaaaaaatatcagggatgtgacgaggatcaggatgatctgatctccataggcaccataggtctgatcaaagccatttccacctttgatcccagccggacttccaagctttctacttatgctgcacggtgcattgacaatgaacttctcatgatgttccgtgcccgcaggaaacgttccagagaagtttctctctatgaacccatcggcacagaccgggaaggcaacgagatcagccttctcgatatcattgaaagtccacccgttgatgttgtggatgattgtttcaaaaaggacagcatttcctatcttctccgttatatccggacagtactctccccaaaggaataccaggtgatctgctgccgctacggtttgaatggccaggagccactgacccagcgagagattgctgaaaatctctccatcagccgctcctatgtatcccgtatcgaaaagaacgctcttcgaaaactccgtactctttttcctgaaaatcagtaaaggggagaacgttcttttcgttctcccctttactctcttatccaccctttcggatcattcacctcttcggagaatatcaaatacctccggcatctcagtcagtttcacatagatcctctgctgagcatgtggtgcactctccatagcttcgccctcttcattataaatggcttccactgtgaccggaatattccttccgtccggtttcatgatctcgatggtctctcctacagaaaacttgtttctctgtgtcagtcttgccagacctctctcatcgatctcttctgcaaatccaagatatgtgtattctcttacatatgtgttgctgtcatagatctgggtattctcatccggctttccgtaaaaaaatccggtggtaaactgacggtaggtacaatttgagatctgctcctgataccacggcatatttgcatgatatttttccggactttccatacagtcgtcaatggctttgcggtaggttcttgccactgttgccacataaagagctgttttcatacgtccttcgatcttcaggctgtcaataccgcttgtaaggatatcttccatatgttctaccatgcagagatccttggaattaaaaataaaagttcctctctcattttcaaataccggcatgtattctcccggacgcttctcctccacaacagaatatttccatctgcagggatgggtacaggctccctgattggcatctcttcctgccataaagttactgagaagacatcttccggaataggaaatgcacatggcaccgtgaataaacgtttcaatctccatatcctccggaatatgtgcccggatctcgcggatctcttccagagaaagctctcttgcacttaccacacgtttggcaccaaggttataccagaaacggtaagtctcataattggtattatttgcctgtgtactgatgtgacgctcgatctccgggcagatttcctttgcatacataaagattcccggatctgcgatgatcagtgcgtccggtccgatctccttcagttcctgaagatattcccttacaccctcaagatcacggttatgcgccaggatgtttactgtcacataaacctttacaccatgggaatgggcaaatgcgattccctcacacatatcttcttttgaaaaattcttagcctttgcacgaagtccaaaagcttctccgccgatgtaaacagcatctgcaccatatatgacggcaacctttaaaacctcaaggctgctcgccggaaccaatagttctggtcgtttcataaacctgttctcctgtttttacacttacagccgctccgtctccaagaggaagcaccgatgtacgaagcaccgggctgtgagtcagctgccagagatattctctcattcttttatagattgtacggttacgccgttccacaagataatgagattcaataatatccccttcctgcagcacgttgtcagataccagcacgcttccctctttcatcagtctcagcacgtcaggaagccagtggatatactggcccttggctgcgtccatgaagatcatatcaaaggttccggtaagattcttcaggatttctccggcatctccctccagaagcgtgatctgtgactctcttcctgcgcgcctgaaattatcctttgcgacaggaattcttttttcataattctctatggtaacaatttccatatcttccggcccatactcacacataagaagtgtggagaagcctacggcagtccccacctccaaaatgcgcttcggttgtttcagtgccagaagcatcctcataaagctctgcatatctctccggatgatcggcacccggtctgcaagtgcctttgtctccaactcctgcagaaatggagtattccccatatccagtgaattgatataggtctgcatgcgttcttctacgatcactggctgttcgatccttccttgctctcttctcctgacagcactgcaatgatcctggtcggtgtataagctgtactgagaaggtatgtacctgctttgatttgtccgtgatatgcggacattctttcctgtatggtaaatgcaagcgcatccttgataagacccttctgctccagtgtcttgcctactttatatgcagaggcaccttcttttatgactaccgtgacctgctgtccctctcccgggctcatagcctgctggttaaacacatcgtagccaaactgatatgctgattttccaacccagatcagaaatacgataataaagatatatacagcggttttaaatacccctccagccagaaaaacgccggccctgccaaccttgtctcttgtgtctgccatagtctttcctcctataagtcaggaatctgtatgtcgatcccgtccaccagcgtcctgcatatccgctgcatcagtctgcacagcgcaagctctgcgtcgagataggcatttactttcaggttctgtctcagacttgcagactcctgattgagctgttccgcaatatggaacagctcatccttgtctgaatgattctgcagtctgaaattatctccacggaatctcatcactctggctttcagctcaggatccgcttcaagctgggctgcctgtttctgatattcctgatattcatcgcttctgtgcacagcatcgagaagcttctcgatctccatgctgatctcatccatgaacctacgcctccataatgataggcaggatcataggatttctcttggtccgtttccacagatactctccaagggcatccttgacctcggttttgatcttgccccagtccgtgatattgttctccaggcaggaatccagtgcagtttccacaacctgtctggcatgctccataagatcctcagattctcttacatacacaaaacctctggaaacgatatccggacctgcgagaactacattactgtggcgctccagtgtcataactacgatcatgattccatcttcagacaggtgctgacggtcacggagtacgatatttcccacatcgccaacgccaagtccgtctacgaagatcgcacctgtatgaacgcttcctgtcaccttggcatcctgtccgtccaactccagaacatttccggaagaaaggataaaaatattctccttcgggattcccagatcttccacaatgtgtttctgtgcagtcagatgacggtactcaccatggattggaatggcatatttcggttttacgagggagtagatcagcttgatctcctcctggcaggcatgtccagaaacatggacatcctggaaaataaccttggctcccttcatagacagttcgttgatgaccttggaaactgccttttcatttccggggatcggattggagctgaagatgatggtatcgttaggcttgatcgtgatcttcttatggatattggctgccatacgggaaagtgccgccatggactcaccctggcttccggttgtgatcagaaccaccttgtcgtccggataattcttcacctgatcgatctcgatcagtgtgttctccgggatctgcagatagccaagctctgacgctacggaaataacattgaccatactgcggccttccacagcaacctttcttccgaaccggtatgcagtgttaatgatctgctgcacacgatccacgttggatgcaaaggttgcaatgatgatcctggatgtacggtactcattaaaaagattatcaaatacatgtcccactgtacgctcggacattgtaaatcccggtctctctgcattggtactctcacacatcagtgcaagcacacccttcttgccgatctctgcaaaacgctgcagatcgatggcatctccaaataccggtgtataatcaactttaaagtctcctgtgtgtatcacgattcccaccggtgaataaatagcaagtgcggatgcatcctggatactgtgattcgttttgataaattccacagcgaaatccccaagattgatcacctgcccgtgttttacctctttcaatttggtagaacgcataaggttatgctctttcagtttgttgcggatcagtcccagtgtcagcttggtagcatagatcggaacattgatctctttcaacacatacggaagagctccgatatgatcctcatgtccatgagtgatcacaaatcccttcaccttggaaatattttccttaaggtatgttacatccggaatgaccagatcgattcccaacatatcgtcctcagggaaagaaagaccacagtctacaactacaatactgtcgccatactcaaaagcggtaatgttcattccgatctgctccagaccgccaagcggtatgatcttaagcttggatgttgttctgcggccggttttccgaccggatggcctgccgccggtctttgccggtttctgtgtgtttctgctgttttttacagcgccaccggctgctgttttctttgctgttggccggaaaggcttatcctgacggtttttgctgccaccacgatactgtcttgttcttgatccggcattcttttgtcttgctgcggttcttctggcaccgcctgcggaaacttgtactctgctctccgcatttttgttgtcatcgttgttctcgcttttcaaaaatcgctcctccattcaaaattcacgtcatccagcatctgctgaaaaactgcatatacagcctgaagttcgtcatcatcctcgaccatctcataacaggcttctgtgcttcccggagctgaaatatccttcagaatatatgcgtctgcttcctcatcctgtgaatcggacaccaaaagataagtcacacccgcaatattggtctgctcctctacgtaaaactcagcagctgtgccgtcgtctgactgaaatattattttttccatatttaattcttccttatccgttcttgtcaagcggatattcacaatccgcatttgctacctgatccgctcaaaatatctatttgcgtttccgatcattcttccacgccttcctgctgctctcttctgtgtgcggcagcatccagatatccctgcaggataaagactgctgctacctgatccagatactgtttacggtcttccttatgcacaccggtctcctccagagtacggtctgccgccatggtagtcagtctctcatcccacataacaacaggcagacccgtacgtttctccagcatttccttaaactccagagatttctcggcccgctctcctactgtattgttcatgtttttcgggtatcccagaacgatctccgtaacctgatactccgaaatgatctcttcaatacgtgccagagtacgacgaagcttgttttcctgcttgcgccatacggtttccacaccttgggctgtcaggccaaggggatcgctcactgcaaccccaacggtcttcgagccatagtccagtcccagtactctcatattaccgttcccaggacttattcttgatatactcggtgagaagctcctctaccagctcatcacgctccaccttcatgatcatgcttctcgcacccttgtggcttgtgatgtaggtcgggtctccggacataatatatcctacgatctgattcaccggattgtagcccttctcatccattgcattgtacaccagatccaggacttcttttacctgaagctcctgatccggttttgttctgaaatactgtgtatttcccagattattctctgccattgtctctcacgtccttaaaatatattcttttttattttaatataaatttacataaattacaatcttaaatttaacgaggattgcgaatacaaactgtcaacgttactgttcactccgttctcagtaacacgcttcgcaaaatattaccagtgaacaaacaacctttcaacatacgatcccgttcttcactccacggcttcaccggtcatgatatgctcttcaagaaagccttctgcctttacgattacgatatcatttacgccataagcttccgatttcggtacagcagtttttatatactcccggctgtgtcccagataccaggtccgtccatcctttgtatactcttcctcgatcagtacctccaggtttttgccaagcatggatttctcataatcccctgcatgacgatgatgcaactcgatcatcttctcactgcggaaggatttctccgcctctgtcagctgtccgtccatggcagccgcctttgttccctgtcttctggaatatttgaagatatgagtctcgtaaaaacggatgctgtccacaaaatcataggatttccggaattcttcctccgattcctgcggaaagcctacgatcacatccgttgtcagtgccggatttccatacacttctcttaaaagctcacagcgctctctgtattccccgcttctgtatctgcggttcatcctctccagggtctcatcacagccactctgcagggaaagatggaaatgcgggcataccttcggcagcgccgcgatcccttccgcaaattctcttgtaacgattcccggttccagcgatcccagacggatacgcctgatcccttcgatctcatgcacagcacggatcagagaaagcagtgtctcttttttctcctccggaaaatccactccataggagcttaaatggattcctgtaaggaccacttccttataccctttttccgcaagtgcacggacctccttcagcacactttcaatattccggcttctgacacgacctcttgcatagggaatgatacagtacgtacagaactgattgcatccgtcctgaaccttgatatatgcccttacatgttctgctgtatgatcaatggaaagttcctcatactcttttgtctgattgatcttgatcacatgggaaccatggcccggtttgttttccgcatattcggccagtgcctccacaatattgatcttctgattatttcccagaacaagatcaatggcttcgtctttttccagtttctcgccaccggtctgtacataacagcccgttgccaccacgatcgcttccggattcattttttttgctttgtggagcatctgtcttgattttctgtctgcaatattggttactgtgcaggtattgatcacataaatatccgctcccggctcaaaaggcacgatctcatatcccgcctcctccagaagctgctgcatggcctcgatctcataggcatttactttgcagcccaggttgtgtaatgcaactttatttcccatttttcctcactttttttacactttaactaattattaaaacaatttttatctcttttcaccttgactttttgggtactgacaggtaagatgaaagctgtaaaacaacaaaaatttatcaagggaggttattataatgaaaacagctaaaatctcactgaattccatcgataaggtgaaagcattcgtaaacgagatcagcaaattcgactgcgattttgatttagtatccggaagatatgtgatcgatgcaaaatccatcatgggtatcttcagcctggatctttccaagccgatcgacctcaacatccatgcagatggcgctgctctggataacgtaatgcagattatttccaaatatacaatcgactaatctatactgtatatttgagaggaactgtatcggatacagttcctcttttttcatgctttcagaatccttctgttctcaatgaactcccttttcctgatatatcggtaattccagggaacctctgcagcgaggttccctgtttgttttttcttatctaaaaacggatcactgaatttcaatgatctctgtggtattcagagccgtttccataagctcatcgatcttctcagaaagcttctgctcagaacggcggatcaccttaagattcggctttgttacaggatgtttcgctacaaagatggtacagcaatcctcgaacggctgaatagaagtctcaaaggtatcgatctttctggaaatacggacgatctcctctttatcaaaaccgatcaccggacggtataccggaagtgtacagacctcatttgtagaagcaaggctctgtaaggtctggcttgcaacctgtccgatgctctcacctgtgataagtccgagacaacggtcttttttagcgaaatgctcggcaatacgcatcatatatcttctcatgataatagtaagctcatcatgaggacactgatcataaatataaagctgtatatctgtaaagttaactacatggagacggatcggtccgctgtatttggctaccaggcgggcaagatccactaccttctgttttgcgcgctcactggtgtagggcggtgcatggaaatataccgcatcgatcttgacaccacgttttgcgatcatatagccggcaaccggactgtcgatcccaccggaaagaagaagcatggcttttccgtttgttccgatgggcattccgcctgcgcccggaatggtctgggaatatacgtaaatcttgtcacggatctcaacagaaagatccagctccggatgatgaacatctacacttgcctccgggaacgcatccaggatacgtccgccaagctcagcgctgacttccatggagctgatcggataggatttctttgcgcggcgtgtccagaccttgaagcttccgttaaaatccggatgccactgcttcatataacccacaacatcttcggcaagcttctcaaagccctgttcttcatagatcataaccgggcagatgcctacaataccgaatacatgctgcagagcatctacagcctcatcgtaatcataattctccgggcagaatacataaactcttccctgctctttttttacttcaaaatctccctcgatcttggagagtgcgatctccatctgatgtacgagagcatcttcaaaacgatagcggttttttcccttaagggcaatttccgcatatttgatcagaaatgcatgtactaacataaaaatccctttcttctgtattctctatcgacgtgcatacctgcgcagcatcggaattgtttttcccagtgcttccaggcagtaatctacctcttcaaaggtattttcctcacagaagctgatgcgaacggtactttccacatcggctctgctcaagcccatagctgtcagtgttgcactcggttttctcttatgactggagcatgcacttcctgcggaaatatatactccgaattcttccagtgtatggagcaggacttcgcttcggactccatgaaaagtcacgctcatgatgtgcggtgccccttctcttaaaggcattccgttgatggtgatgtctccaagctttgaaagtccctctgccatccgttctttcaggtcataaaggtgctgtatttttttatcaaaatccgtatataccatctctgcagcaacgccaaggcctgcgattcccggtacattgtccgttccggaacgcatgccgttctgctgtccacctccaaggatctgtggctgtactcttactttttcgttgatgtagaggaagcccacaccctttggtccgtggatcttatggctgctcacagaaagaagatcgatccccagctttttcggatagatacgatactttccgaatgcctggatggcatctacatgaaaaagtgctttcggatttttttcatggacaagctttccgatctcttctaccggcatcacggctcccacctcattgttcacgtacatcacagacaccagaatggtatccggacgaagagccgcttccagtgcatccagctttacaactccctgatgatcaacaggaagaatggtcacctcatagccctgttccttcagataagcaaaaggctgggccactgctgcatgctctactgcagttgtgatgatatggtttcccatacgcttgttggcttccacaccaccgatgatagcaaggttatccgattctgttccaccggaggtaaaaagaatctctttttcattcactttcagtaattttgcaagggtctgggcacttctgcggacataattctccgcttccattccctttttatgcatggcagaaggatttccgaaatcttctgtcatggttttgcagacaatatcctttacttcatcgaagcatctcgttgtcgcggaattgtcaaaatatgcttccataatctattcatcctccagttgaaacatcagaacagaaagtactgcgagtcccgcggtttctgtccgtaagatccggtgtcccagggtgatgggtttcgcaccggcttccatggcatctgccacttcctgctcttcaaaaccaccctcagggccgataaagacacctatgctttttcccggttcgatcgaccggatcagttctttcgtctctttcattccctttgcaagctcataagggatcaatagaacgtccagttcttttgcatagacaagggcttctttaaaggtcatcacagaatgtacctccggcaccagcatacgcttggactgttttgccgcactttctgcgatctgctgccagcgggatacttttttttctgcttttttgttatccagttttaccacgcagcgtctggttgaaaccggaactacggaatatgctccaagctctactgccttctggatgatcagctccatcttatcagccttcggcagtccctgaaaaagataaatacggttctgcagctcataatccggctcctgtacatagaggatatgaagcaggacttcatcctcccccgcattttcgatcacacagtgatattctttttccttatcgctgatccagagctcctcgtcttttttcatgcggagtacgtttacgatatggttgacgtcacttcctgtgatatgaatctcatgtctgtccccgtcaatctgatgaggttccacaaaaaatcgctgcatgagatcagtcctttcttgctgtcacagatacccactcgccctgatgagtcacctcaacaagcgtcagtccggcgtcttttacagccttcactacgacatcctcctttacatccaagatgcctgatgtaatgtagtaagcgccttttttcatctgtgcaacgatcaccggagtcagcggtaccagaacatctgccagaatgtttgcagttacgatatcatatttctcatatccgacctgattctgaacttctttgtcatcgatgatgtttccgatcatcatgtcaaaggatttctcctcgatctggttagcctccttgttctcagatactgccgaaactgcacagggatcaagatctgtaccaaccacatgacctgcaccaagcttcagtgcaacgatccccagaattccacttccggttcccacatcaaggatctccatccccggcttcacaaatttcttcagctgacggatcacaagctgtgtggtctcatgcattcctgtaccaaaggcagttcccggatcaatgtggaggatcatcttgtccttatcttctgccttcacttcttcccatgacggtacaatcaggatatcatccacatagaactgatggaaatactgtttccagttgttgatccagtctttatcctctgtctgggattctgtgatggttgcctctccgatatccacaaagcttctcagatcctccagtgcagccttcacatctttcaggattgcctcggtatccgcatcctcttccagatagaagttcagatatgcgatcccgtcatctgctggtccctccggcatgatatccacaaacatctgtgctttgtcctcatcggtcagcggctgtttgtcctggatctccacaccttcaatccccacctcggcaagtgtacagatcacaatatcctctgcctctgtttttgtcttaagtgtaaaacggttccatttcatattttatatctccttatgctgtatacacatttacggattttcattccagtctgtcgcctgttttctattgtcccgaaaacgggcacttcttttaatatacacgaatacagaaaaaaaagaaagaggcattttgtgcctctttcctgttttcactttatttattcctcaaacatttccttaactttctcacggaaaccttttttcttcttttcggttttttcggaagtctcggatatgctgtcctctgacggacggtttccacatgccgcatcaaaagcttccagagctttctttgcttcctcattgagatttgtcggagtctggactaccagggttacatagtgatcaccacggacattcttgttacgtaatgacggaacacctttacccttcagacggatccttgtatccgtctgtgttcccggtttcacctcataggaaacctcaccgtcaacggtattaatacgcatctcaccgccgagtgcagcctgtgcaaatgtgatcggagctgttgaaaagatattcatatcctgtctctggaagatcggatgacgggctacatttacctccaccagcagatctcctctcggaccgccgttggttcccggctcacctttttcacggatacggatgcactggccattgtcgataccggccggtacagatacctggatcttctttctggaagaagtatatccggttccacggcaggcactgcatttatccttgatcaccttaccggttccattacagtccggacaggtctgaacattacgtaccataccaaacatggactgctgagtgtaaacgatctgaccctggcctttacatttcggacatgtgaccggtgatgttccaggtttcgctccggttccgtgacatgtggtacactcatccttcagaacgatctccagctctttctcgcatccgaaaaccgcttcctcaaaagtaatgttcacacgtgcacgaaggttggcacctttcatcggtccattgttggcccgtctggttctgcctccgccgccgaacaggtctccgaagatatctccgaagatgtctcccatatccgcaccgttgaagtcgaatccaccaaagccgccggcaccgcctccgccgccgttttcgaatgctgcatgaccaaactgatcatactgtcttctcttgtcggcatcacttaaaacggagtaagcctctgtcgcctctttgaacttcgcctcagcctctttatcacccggatttacatccgggtgatatttcttggccagcttacgatatgctttttttaatgttgcgtcgtcggcgtttttatccacacctaagacttcataataatctcttttatcagccattgtaattatttcctacttgtcttagacttccttgtaatcagcatctacaacatcatcgccgtatcctgcttcatttccgccctgagcaccagcgtttccgcccatgttgcccatatccggtccaggaccagcctgaccctgagctccctgagtctgctcatacatcttggagaacagtttctgagcgctctccatcatcttctcctgtgcagccttgatgtctgcaacctgagaatcagtaagctcctgagcatttgctgtctgtgcaagaagatctttcagtgcattgaggtcagcctcaacacttgctttatcgtttgcgtcaagcttgtcgccagcttctttcagtgcattctcaacctggaataccatggagtctgcattgtttcttgtgtcgatagcctctttacgtttcttatcctgagcctcgaactccgctgcttctttgacagctttgtcgatatcggaatcggacatattggaaccagctgtgattgtgatgtgctgctccttacctgttccaaggtctttagcggatacattaacgataccgttggcatcaatatcaaatgttacctcaatctgcggaactccacgacgtgctggcgggattccatccagacggaactggccgagggatttgttgtctttcgcgaactgacgctcaccctgtacaacgttgatatctacagctgtctggttatctgctgctgtggagaagatctggctcttctttgtaggaattgtagtatttctctcgatcagacgagttgcgataccacccattgtctcgatggacagtgacagtggagtaacatccagaagaaggatatcaccggcacctgcatcacctgcaagtttaccaccctgtacggaagcaccaagtgcaacacactcatccgggttcaggttcttgcttggctctttgccagttaactgtcttaccttatcctgtacagccgggatacgggaagaaccaccaaccagaagtacctggccaagctcagaagctgtgatacctgcatcagacagtgcacggcgaaccggctctgctgtcatctctacaagatcatgtgtcagctcatcaaatttagctcttgtaaggttcatatcgaaatgcttcggtccctcagctgtagctgtgatgaacggaaggttgatgtttgttgttgttgcggaagaaagctctttcttagctttctcagctgcctctttcagtctctgaagagccatcttgtcgttgcttaagtctacgccctctgttctcttgaactcagcaagcatgtaatctgtaactttcttatcaaagtcatctccaccaagacggttattaccagctgtggaaagaacctcgataacgccatcaccgatctcgatcacggatacatcgaatgtaccaccaccaaggtcgtataccatgatcttctgctctttctcattgtcaaggccatatgcaagagctgctgctgtaggctcgttgatgatacgttttacatcaagacctgcgatcttacctgcatctttggtagcctgacgctgagcatcgttgaagtaagccggaactgtgataactgcctctgttactttctcaccaagatatgcctctgcatcctttttcagtttctgaaggatcattgcggagatctcctgtggagaatatttcttgtcatcgatggttacacggtaatcggtacccatctctcttttgatagaggagatcgttctgtctgcatttgtaactgcctgacgttttgcaggctcacctaccagacgctctcctgtttttgtgaatgctacaacggatggtgttgttcttgcgccttctgtatttgcgataactgtcggctgtccaccttccattacggctacacagctgtttgttgtacctaagtcaataccaataatctttcccatgattttttcctcctgttttagtctgtatctgttaaaataaagtttgttgtcagttagttcgcaaccttcaccatactgtggcgtactacgaaatccttgtaagtgtaacccttctggaattcttccaccacgatgttctctccaacctcttcatcctccacatgcatcactgcattatggaaatccgggttgaattcctttcccactgcttcgatcggcttcacaccaagctcatccagtgttgtggtaagctgcttgtagatcattttcattccatctgcaaaagcatcgccttcctgtgcctgtgcaagacctctttcgaagttatccacaaccggcaggatcttttcaacgatttcttttgctccgatgatgtacatgctggatttttctttttccgttcttttacggaaattatcaaattcagccatggtacgcttcaggcgatcggtaagttcctccaccttctgctcagatttatcttttttcttctttccgaagaaggaagtttttgatttttcttcttttttatcctctgaggcagcttcttcgcctggagtattattttcttcctccggcagatcttctccctccggtgtcaggttttcttcttcctgatctccgtcagttacggggatttccttctccgcttcctgctcttcggatgttttctttgtttcctccgacactttttttctaccgcctttctaagttttcttctttttcaaaacgtcatccagatgattcttcagttccttcagactgtccactacattctcataatccattcgtttgggaccgatgatcccgatggttccgtacattccgtctcccagttcatatctggcagttacaatgctgcagtccttcatggtctggattggcatctcatcaccgatgtaaacctgaattcctgtattctctccatctgacatctgttcttttacaagatcggcaagttcatgcttctcctcaaatgcggagatcagctccgttgccttctctttatcggcaagctccggatacttgaagatgttagttgcacctgaagtatagatctccatatcttcctcttccacatgaatggtggctgccactgcatccagaaccgttgccaccacaccgctgtggctgcctgcctgttccttcagtctggcgatcatcccaaggttgatatcctggattggaatcccattgagattggtgttaagaagaagattcagtttcaggatcgtctggtcgtccatttcctcatccagattgatgatctggttccggactgtgttgttgtcactgacaaccactgccacaagctgaagctcgctcattctcgacagctggatgaacttgatcttgttgccgctgtactgcggaacggaaaccatggtagcatagttggtattggaagcaagaaccttcgcaaccttcttaagcaccttatccatcttatctgtcttctcaatgatcagatctcgcagctctgcaacctccgcttccttctccttcatcaactcattgacgtaaagtctgtagcccttatctgaaggaatccttcctgctgaggtatgaggctggacgatatagcccatatctgtcaggtctgacatttcatttcggatcgttgcggaactgacattgagatccgcatacttggaaatggtcctggaaccaaccggttctccggtttccatataggtcttgatgattgcttttaagattttttgcttgcgctcattcaacacctcttccatgaatccatctcctttcctttttattctttcctgacggatgttgattctttttttacatctgttagcactcattttagtggagtgctaacatctacagtctttaagatatcaccatgtaaaatatttgtcaatatgttttgaaaaaaagttcttattttttcaaaacaaaaaaagcatcagtacgatgcttttttgtaatactggtctatgcagttctgtgccccggcaaaaaattccgcttctgttttctgtcccagcatatatttctgaaattccgttcccatggacgaaacggcttctatggaatcggcacacagtggtcttgctttcagcttataatctttcagatattgccggatcatttcaatgccatccagatcaaaattcttatcctcgatcacatccagtcttgccggacacatttttgtcagctgtccgtaatttttactggcctcatatccggacacatactgaaggaacttcagagctgcttctttatgatcagaatttttattcagtacatactgccaggttgcgatattggtcaccttctcgtcaaattccggaaatggtgccatatggatcttatcttttccatacacgcctgcattctgaaaagtactcaacacaccggtatacataaacatacatccatactggccgtttataaatttttcattcagctggtcatgctggtcgatcagattctcctctgatatcatccctgtatccagcattcgcttcatatattctgccgcttctcttgttttcggatccgtccagtctgtataatctcctccgaaaaaatcgacatactcgctgatactattatatatgtaagaaatctcccatgcatccccatatgcatattttcccgtattctgaagctttttctgaaggatctcaagatcactgagacaggagagtctgtccagaccagcctgatccagcaattcctggttcacccagaatgccatgatatccatcctgaacggtaccgaaaaaatatgtccgtctgacatgcatatttctttcaggtattcctgcagaaaattcgccgctgtctcctctgtcataaccgtatcttccaacggaagaagaaatcccttatgtttaaattcggatatcatctcatcatttactgtgatcagatcaacagaatcatctcctgatgtcagaagagttgctattttggcctggcgattgtccgcattggccggacatttttcaatatggatctttattccaagatctttttccgcctggctgataaaagaatcaaagccttctgtgcctgcatccacatgaaggatcgtcagttcctgtctgttctccggcacaatatcagatgcagcctccttcttctggactccacatcctgtcactgccagagccagggcaaataccccgcaaaatacctgttttttcaatctctaccaccctttttatctgggccatctatcctcttttgacatcaacggctggaacggtgcatgaggaagtgtctgataccagtacgctacacttgccacatcatcctgtcgttcaaacaggccacggtatccgacgcctatctgctgaatcgtaacgcgaagatcctcttcaaagcagattggatcctgtaaatgccatctgtaaaagcctctcattggcgggcagtcatcattatgataaaaattgtggatcagttcgtcatgagcagaataatacggatatcccagatatggtgtgttataattctgttccacggtttttccatccacctgtttggcaaagctccaggaacctccaaagtaatcttccgttcctgttccgcagatggtcggatactcctcatctccgtcaatataaaacttcatttctccctcgccccaccagtaacgttccagtgtggtaagtgccatgtaggttcctatataatggccttttccttttactccatccaaaattgtataatcttttgttttttctgtcaaccgttcccgtctccactgcgcatggaaataagcaatatcgtccggaagctcatcatagagacagtaatctacctgataaaagaaagccgggattttatttgcatgctggttttccagtgtgatctttgctttcttcttaaacggcatcgggaaatagcagttaaagcccctgtttggaacaacagccaccggaacagaatttacaaaacattctcttccgaatccgcagcagaagaaatcacccagaggactttccacggaaggagtttcctcgtcatcccagtacatacggattacaagatctctcagtacaaagcaatctgcctctgtagtcttgttatcaacggtgatccagatatgattgatctgtcccggtccttccatttctgccagagttaccacagttcccggctcaatatccctgagacacgggcttccttttctggacggtcccagatgacttgcagccataccgcctctgcctttttctccatgaggattttctgcgttgatcgcacggctttttccatgctttgcaagtgcgatccctcccagtccgcctgtaaatgcctgatacatatctgttttctcctctcttttggaaattaaaaatattatatttacgcttttactccacctgccatgataccatccatgatctgtttctcaaaaacagctacaaagataatgatcggaagaaggatgatccatcccatggcgctgaccagatcccacggaactccatacatgttgtcacgtaacggaagctgtacgatggaaacagaaagtacctgaataccatttgaataaaacaacggtgtgaaaaagttattcagacaggtaataaagttgataatgcaaaccgtagcgattgccggcttcatcagcggcagaacgatcgtaaacagtctctgtgaaaaagatgcgccgtcaatagcagctgcctcctccagtgagatcgggatctcaccgacaaagtttctgaggatcagaaccgtaaacggtataacggtactgatataaagaaggataagtcccggatatgtatcatacagctttaccttctgcataaactcatacagcgggcgggctgtgacaacctcagggatcagcatggtagccagaacaaacgcaaatgcaacagaaactccctttgagttaaatcttgagaagccataggcagccattgcacacagcacggtactgatcacaagtgtaatgcctacgatcagaactgtatttccgatctttgaaagcagtcctacattctgtatcagaaatttatagctttccagtgtgggatgatccggaagataatcgatcggtgttttaaacagttctcctgacggtgtgatcgaagaaataaagatccagtaaaccgggaacaggatcagaaaagccacaactgcaaacagaacccatcttccaacggctaccactccatgataaacattatattttcctgtattcttcacgataattccccctaactgtcaaacttattcataacacgtatattcagccagctgaagatcgccattacaacaaacagcagcatagccagcgccgaagcatatcctacgtttagatttgtaaatgcttctgttgtgattctgtatgcgatcagcgcagtatcctctccagggcctccagatgtcatggaataaaccagatcgaaggttgtcagtctccagagtgtgaacggaatacataaagtcaggacattttttgcgatcagcggaagtgtgatccggaaaaagctctggatcccgtttgcaccgtctacctttgctgcctcatagatatcgccggaaataaactgaagtccggaaagtacaagaattgcaaagaacggaaggtccttccacaggtccattgcaattaccgctgctcttgcagtacctgtattgatcagccagctgttctggtaacccggtacaaaccagcggataaaatcattgatcagaccataatcattgttaaatgcccattttgcagccataccggctactactgcaggcatagcccacgggatcagcacgatggtcctcagaaaacggcggcctttgaatttcatattcaggatcagtgccaggataactccgaggatcacatgaaagatcatggaagcaaccacaaatattgccgtaaagctgatcgatgtgagcactttaggatcagaaaataccttcaggtaattcttgaagcctataaattcattgatacctgcaaggatactgatattaaagaagctgtttttcacagtcatcagaatgggatatactgttgtaaaacctcgaatcagtacaaccggcaggatcaaaagccatggtatccacttcatattttttttgcttattgtcatggaactttcctccctgttcatcaagcaatgtaaagcagacttttacctctgctttacattgctgtttttttatatcttttacttatacatatctaccacatcctgagccttcttgcagaactcatcaactgtaatctcgtctttcatacaggactggaagattgttcccatatcgctgataaattccattgtctgtgccaccatcggacgtccctgtacattgcattcatttgcatatctgctgtacatttcttttgccgggtcagaatccggaactaccttctctgcaacatcctttcttgcaggatatctgtcaaatgctttataggaagcttccattccgccttcatcagccatatactggaggaatttcacagctgcatctttattcttggatgctttgttgagaacatagctccaggaatctgtaaagatcgcacgctctcccttgccgctgaaatccggtaccatttccatgtggatcttatctgcgccaagcatatctgcctttgcataatctgttccaaggccccacatgaaccagcatccgtattttccgtcattgatcttcggattcatctgctcatatttatcagcgatctgctcgatggatgtttctttatcagcaaccagatcgtggaggaactgaactgcttccttgttttcctctttggtccagtcaaaataatcgccgccgaacatgtttacaaactgtgcaagctcgttaaatgcataggttttctcccaggaaccgccgtagccgaatcttccgtccttggaaacagccttcatatacttcatgaaatcctcttttgtatcaatggatttgattccgacctcatccatgatctcctgatttacccagaatgcaaaatatcctgtatagcctggaacaccgataatgtttccgtccttatctgtgatcatattctttacatatccctgggcaaactgatcagcgatatcatctgtcattactgtatcattcagtccttccagccatccggaatttttaaatgccgcactcatctcatcgttgatctgaatgacatccacggaagcatctcctgtggaaagcattgtggtgatcttctgctgacgggtatctgtatctgtaggtgccgcaattacattaatgttcaggcccgtggcatcttccacatttgcaagccagtcctcaaaatccgggtctgtggtgtcgatgctgtataaggtaagatcatatttctcctctgcggaaacagtaaccacgttacctgccatacccacaaccatcgctgctgccaaaactgcactcattacttttttcttcatatctttcttcctttctggacattttcgtgtttgtccacacctgtttttgatggtttaaggataccagagagccccctcattctaaatacaatattttatgatttctttatattatttttcgttctcttgtatttttgttgttaattttttataatccttttatataatctatatttgtaacggctttttttcacagctggattcggtttcattaatttgttttcgacataaaggagagtatgtactatgaaattccacaaatgtatcccacccattttttcctcatttcgctataagctcctgctcgcatttctgatcgcaactatggtacctctgatttccctgaccttcatcagctatcacatttcctataacattgccagagatcgtatcatcgattctgccgtaatgactgacaagcagctggtctctcagctgaacgaccgcctcggtcaggttgaaaatgtagcagataccatacagtttcaaatgtactccctaaatcagccttcctctaataaggtagatgcactgaaaaaattcaccactgtaaaaaacaatatttcgctgtataaatccacattcgatttcttccatatatatgtttttctgcagcccgatcagctcggttcaaaagaagacctgtacttcttttccacagatgagctttctgcatatggtctggataaaaatattgtttccggttcaggcttttcctctgtctggataccggtttccaatatgcctctgcctaaaatactgtccacaaaaaaatcatctgccgatgtgatcctctgcgtccgggcactgaaaaatcaggccaccggtattctggaatacgcctacggcattgctctggacacctcagagcttaccacttatctgcagcctgctgctttggattcccgcatatacagctacattctcacagatcacggagagattgcagcaaaaaatacatcctcactgaatttatccggaatttccaaagcacagtttcagaaactcaaaggaaatgcagattcttcttttcacagcggcgacaaatattataactgctgcaccttaagcaatggctggcttcatgttaccgaaatcccggaaagctatattcagggcaacacgcacatcctgatccgtgccttactgatcactgtccttattttcttgctccttactgttatcatcgttatcctgttttccgaaaatcttacccggaagatcactgcactttcctatgcaatggaagcctttcagctgggatatgacccggaacatctatctatcgttactgttccccacccggatgatccttccaggtatgatgagattgacagactgggcatcacctttgaagatatgcagcacacaatagccggaaacctgaagtccattgtaaatctttccgtaaacgaagaacgtctgaaataccagctgctccagtcacagatcaatccgcattttctttacaatatcctgggatcgatccgtacctgccagtcccttggaaagcttgacattgctgatcagatgattgcaaatctgactgccttttaccgtcttaccctgcgtaaatcaaaggaacttattcctattaaagatgaattggaaattgcccggctttatctggaaatggaaaagctctgtcataaagataatctggactgggagatcgaagcagaagatggaatcgaaaatttcctgatctgcaagtttacacttcagccatttctcgaaaattccattctgcacgggatttcttcgggcacaccagctgttttcatttcgatccatgttctttatggcgatgatacggttgtgatctccattgaggacaacggtgccggcatggactccgaaacccttgcacagctgcgccatgctattgagcataatgttattgattatgagaagcattttggaatttccaacgtaagttcccgtatttccaacccattatacggaaacggttccgtaaggatccgcagcaaccccggaaacggcacatacgtcaccattgaattcgaacagatggaggaagatatcgatgaaaaaaataatgatcgtagatgataattacttatctgcagaaggtatcgaaaaaaacatagactgggaaacactgaatgcagagatcatccatgtctgctacaatggaacctctgctatcgaagccatgaaaaaagagcctgtagatctgatcatttctgacattgaaatgcctgatcttgacggcatttccatgagccgtcaggctcttgagatcaatcctatggtgaagatcatcctgatcagtgcctatgataaatttgaatatgcaagacgtgctctgctcctcggtgctctggattatatcgaaaagcctctggattatgcctatcttatccagaaggtaaaaaacgcttttgcactgatggaaaaggaacagaaaaatctccagcttctgaaacaaagcaggcctcttcttacggaaaaatttttccgcgagatcacacaccttccgtcttctgaagcagcctaccgactgaagccttatcttaagtatctgaacctggagctgaattatgatttttatacagttgttattctggagcttgaaaatgctccggatctaaaagctgtttacgggattgaaaagtttcagatggagcttttcaaccttcaggatctgataactgaggaaaccgcttctcttgattttgtgtatcttctcccggatatggatggctatctgtgcattctgggacacagcggctgtcagtccaacagcttccgccagcttaccagcggacttatttcctcaatcgcagatgcctgccagccgctggggctttctctcaacgcaggtattggaacaattgtccaggatttctggaacctgaaccattcttataaaagcgccgtacatgcgctggaatacagattctttttcccgcatcagaatatctttgacggaagagaggctctgggttccgatctgtctgttgcagatttttcagatacaaaggaagatgaactgatccggcttctctgcaaaaaggataccgctgccatagatctctggtttcagaatttttccgactggctcactcagaaatttcgcacaaagaatttcgctttcatacagatttattctcttcttggccggatcctgaaatttttctatgaattaaatctggatacgcatgaccttgaagctaaaattttgtatgtttacaaccacataaatgagtttcataatacggaagagctatgtcaatggctgaaggatctgtgccatcttttatgtcggaagcttgattcctccatgaatgattatcaccagaagctctgtgaactggtgatttcctatatcaacgaacactacactgacaatacgctctgcctcaatgatattgctgcctctgccaatgtaagccctgcttatttaagtgctcttttcaaaaaaaatcagggaatcagtctcagtgactttatcacatctcagcgaatttccgcagccgcccgttacctgactacgactactatgagtctgaaggagatcagcctgaaatgtggttatgccaatcaatattatttcagcaccagcttcaaaaagaaaatggggatcacaccttccgcctatcgggaacagcatacataacttcttctcttctttataacaaagttactggcacaaatgccagtgcccttctccggaattttacttataatcaatcaataaagagaaccatcatattttttcgaaggagggatcgctatgaaaaaatggaaaaaaatcgtgatatctctgatgacagtctttgtactgtccatactcccggcagaatcgacaattctgccgggcacagtctgtgttacagaggccgctcccaggatcagttcttccaggctaaggcagatcctgacacaaaaagatgcttccgagcttgccaacgacactctggatatggctgttccatattgggctgatcttctcaagggctccagcatcaccctgcgctccctgggcttttcaactacaaaataagcttttcccaaaaacagatcgaacatacccggcaacacccctggctgtaacagccaggggtgttgtactgtcagctgctttgcagcctattccgttaattcttccagattcttttttaattcgagcatcttgtctctcagctcagcagcctgctcgaaattcaggtctgctgccgcagcacgcatctgcttctctacctgagcgattaccttcgtcagttcttttcggttcatggattccggatcctttttaagcttcacttctgtctctgccaccttcttcgaaacagcgatcagatcacggaccgccttcttgatcgtggttggagtgatgccatgctccctgttgtaagcctcctgtatcgctctccttctttctgtctccgagattgctttttccatggattctgtcatgttatctgcatacatgatcacatggccttcgctgttccgggcagcacggccgatagtctgtaccagggatgtttccgaacgaaggaagccttctttatctgcatccaggatcgctaccagcgtgatctccggaatatccagtccttctcgcagaaggttgatcccgactagcacatcaaacacatccaggcgcatatcgcggatgatttccgcacgttccagagtgtcaatgtctgaatgaaggtatcggacacggattcccagatccttcatataatcggtaaggtcctctgccatacgtttggtcagggtcgtgatcaggactttatttttcttttcaatttccttatttacttctgctacaagatcatcgatctgtccttcgatcggacgcacctccaccttcggatcaagaagccctgtaggacggatgatctgctctgcgcggagaagctcatggtcatattcatattctcccggtgtcgcagatacaaacattacctggtcaagcttgttctcgaattcatcaaagctcaatggacggttatccttggcagacggaagtcggaagccgtaatccaccagtgtctgtttacggctctgatcaccggcatacataccgccaacctggggaactgtcttatgggactcatctataataagtaaaaaatcatctccgaagtaatccatcagtgtatacggtggctgccccggtgcaagccctgtcaggtgtctggaatagttctcgatcccggagcagaatcccgtttccttcatcatttccacatcaaagttggtacgctccgcaattctctgagcctcaatcagcttatcctcacttttaaagtattccacctgctgcttcatctcttccaaaatggcatctgctgcacgacggatctgctcctgaggcacaacgtaatgagatgcagggaaaatcgctgcatggttttccacacttttaatctctccggtaagcacatcgatatctgtgatacgctcgatctcatctccgaaaaattccacacgcactgcccggtctgtagaattcgccggaaagatctccagcacatcaccccggacacgaaaggttccacggtgaaaatccatctcatttcttgtgtactggatatcgatcagctgtttgataacctcatcacggtccttctccattccagggcgaagagagatcatcatatcaaaaaactcctgaggtgcacctaagccatagatacaggataccgacgaaaccacgattacatccttgcgctcacataaggctgctgtggcggagagacggagcttatcgatctcatcgttagtggatgcgtccttagcgatgtaggtgtctgtggaaggaacgtaagcctccggctggtagtagtcgtagtaggagacaaaatattccactgcgttctcaggaaaaaattctttcatctcgccgtaaagctgggccgccagtgttttattgtgggcaagtaccagagttggtttatttaactgggcaatgacattcgccattgtgaaagtcttaccggagccagtaacaccaagcaaagtctcgaactggttgccttctttaaatccctcgaccaatttctcgatggcctggggctgatcgccggttggcttgtatggggcttttaatttgaactcattcatggtaaatccctccatttgtgacttttactatgatcattatcagccaaaaattcgtatccagattcgtaacgaaaagctcatttttatagtgaatagatgtgtttcccacctcgttacgaataaaagtcacaaaactaatatttgcggataaaacagcactcggaaatacctgaaaatactaacctccggtcctgtcatatttttactgtttgttcttgtaacagtccctattatatcaaataaatttttgaaagtatatagattaacgcaagaaaaaagtacaaatgttcgattcttatttgtacttttttctatcactactattctattttttatcatgctgcgttgaaatattcctccaggattaagtctatttcaatcactttcgatacttcactcaatatgataagtttgcgtaaacgcaaagaaacagcgactttgaaaagttatcccgcttttgcttaccatattattttcttaaattaacattcatgtaacgcccaatattacgcaaattcatcgagtcctctacaaactgaagttcatcccaatatgcagacctttgattatacacgcttataaattattggttcatcatatccaaaagttctctttccattaacttccatgctttccgatacttccagaaaattgttggaaaacttttcccaaagtttgaatgtcattaccggagagaactggcttgtgctgcctccctcccagattccgtccttttcatgataaagtgccggattaaatttttcagatttttctagtttagagtaatcaacattcttcatagaatcatatgaaaatgtatttttatcttctccttttggaattttataagaagaaagtaaaattccctgttctatttccgtgataaggaaaagatgtggagatgcatgacgttttccattaatttcataataactctcttcaacaacaaattttcctttgaaatcttcaggaaggttatttattttgtcattacagattgtatttacatgttccgcatatggatatgctttcccttctgcctgcatcttattaaattgatccttattatcaaaatgtcctgtcatcattcctacaaaattatcaagtttcatcatatactttacctcctggtatttgcctaatcacactattcctcttttgcttttgccatactggcgatatctcccactccattcaataccattgtcggaagataagcataagttttgagtgtatccttcgttgaacatccagagagaaccaatacagtagacataccactttccattcctgaaatcacatctgtatccatacgatccccaaccattacagcttctgctgaatgacatccaagcatattcaatcctgttctcatcatcagtggattcggtttcccacagaaatatgcctgtgtacctgttgccatttctataggtgcaatcaatgcacgacaagcaggagcaatgccgttctcaatcggtcctgaaacatctgagtttgctccgatcagctttgcacctttcagaactaaattcgttgcttttgttaatgtatccaatgaataggagcgtccctctcccacaacaacataatccggatttacatcattcattgtgatacctacatcataaagtgcatttaacaggccggcttctcctatcacaaatgccgaacagcctgccgcctgttcttttaaaaatgcggctgttgccaatgcactggtataaaaatgttcttctggcacatcaagtcccatcctagccagtttctgatttaattctcgtggtgtatatccactattatttgtcaaaaacaaatattctttcttttcatcatgcaaccactggatgaattctggaacacctggcaatatctgattgccatgatagatcacaccatccatatcacagatgaatccttttttttcattaaaatcgattatggattttatcatgttcatatgcgccctgcctttcttgtctctttagaatacaccttactcttttcataataaaataaagcgctattttctacaaatatttttatattatatcatccacacataaaatcaaatacatagcactgtaaaatcaaagtaaatatttcgatcaacagaaccttttatgacaacatctctttcacacaagtacttcgataatcacttggtgatattttatatctttctttaaatactcggttaaacgttctctgactttcaaatccactatccagacaaatatttgtaatagaatcactcgtattttccaaacgatggcatgcatagttcagccttgcatcgttaagatattgattaaagtttctatggaatgtcttggaaaagagtctggataaaacatatttgctcacgcccagatcttttgccatctcttccaacgaaaacttcttcttgaaatttgctgatatataggaaactgtctggtaaataagatcgttgctccccacactgctcttttctaccaaatttaattttcctatgcagcgtgccaacacaatttgaagatatgcctgtgcaacagtaatatccgactgttctgtctctaaaattgcatttataaccctatatacctccggttcaaccttttccgctttgatgattgggtattcaggagccatggattgcataatatctgcaaatttggctatcgtaaatggcgatgcaatcagataagtcgctttatttacaccgggtgtcagtacctgatagtgatgaataacatctggaaatacaaagcctatatctcctttttccatatagtatagttcctgtccgacaccaagttctaatgctccacttgttacacaaacgatctccagtgcattatgaagatgtggttcaatatgttttgacttcctatttattgctatgatctcctcttttgtgtcaacatattttaactgcatgaaatactcccctttgcaacatttgtctatatcttctttcgatttggcaagcaatccttttacacctatcttataatcaacttgtaaataaggaaaggaggaattgcaaatgagcaacctaaaaaaatatctgaatgaccttttagtattctacactgaatattttgagcatccttaccatgtataaatactaaaaggactattttgtgaaaactgaatattttcttaaggccatttcacaaaaatgaagtggtccttttttattttcaaaatacagttcaatcactttatatatagaaaaaagcactgtctcatcgagcaacgaccagacaacgctttctcctgtcaattctaatttatgtctgatgcatctgttacttcatctgcagcaatttctttttctgctttcagttttttatttgcatcttctacattcattcttgaaagtacaaacataatcaatacatcaaagattaacggaagccaaagatacataaactgcatcatatcaagtgcagactgcggctgagttgcatttgttccgatatatccactgaactcaagcagccatccaacaacagcggttccaatacctccaccgatttttacgccaagagaagtacaagagtacatcgttccgtcaattctctttccctgtgtaagataagtgtactcagagcaggatgcgataactgcattcatatctccctgccatggtccctgacctaaggctgcaagagctgtaaatgccatcatcagcggaacactgcccatatatcctgcaacaacaacaagtgctctaccgatgactgctaagacataacctcttaagttcagtttatacatacctttccacttaccaactaatgtcggtgtgaaaatcagggcaatgatcagtggaatatttactgcccatgcaaattgtccaaacaaattcttatttttcagtacccatgtcatgtaataaatgccagctccaatcatggcactatataactgctgtaaaatatatgttccacaaatcatcatgtaatatttgtttttaacaagaagcttgaatgcctgtaccattccgtacttttcattatcatcctttacttctccttcgttaagttcttcctcaggaagttccttaacagaaagtgctgaaatcgtatttatgacaagaccaatgattgcatagataatagcaaccgttctccatgccgcagcatctccaccacatttatctacaaatccaactgtaatcgcctgaatcagaagacttgttgaaaacgcaaaaataaaacggtaagatcccatctgcacacgctctttgctgttctttgtaatcagtgacgtaagtgctgaataagcaatattgtttgctgtataaaacacaccatttaacagtgtataagagataaagaaccatgcgtatttagccgttgttccaaagctgactggtactgcaaagcagcagaccagcgtaatggcacaaccaatgtatccgtatagcatccagggtttcgcttttcccattttactgtgtgttttgtcaatcattgatccaaaaaatatatccgtaaaaccatcaaatagttttgatacggcaatcagggtacctacgacacctgcagcaagtcctactgagtccgtcagatagaccatcataaaagatgtcaggaaagcatagactacattacctgcaatatcgcctgatccgtatccaattttgttataccatttcaaatactttttttcttccatcgaatttctttgctcctcatcttcatcgcacttagaatttcaagatgtctaacagagtatgatgtctaattctagttttttctctgtttttgtctgattgctctgtatatccggactttacataacaatcagactctctttccttgtttacgggttacatgaaactttattatccctttatatacggtatcagtgtaaactggaaccggaataatacatcatcaaatcggtactgctccaatacaactggaccacaactgttagaaccaatgccatttagtgcatagtcaacacaaaatactacactatctgattctgtcagttcataattatgcgttttcttctcaagttcttcctgtgtataataagaagcattgaatgaaaatgccttttctgcggatgccacaattccatatcggctgttgttaagttctacatattcacaatcataatggcttccattttcctgtggacgaatatagtcctcatgtaaatcccctacatctgcccggtacaaaccgtggctcgcagcctgatgtttatcacaataactttcctgtggtcccattccaaagtatcttacagctgaaagttttttatccaggaacatcctcacaccaaatctcggaagatccgggaattcatcgtcttttgttactgcaatatctgcatcaatctttccagcagcttctattttccatgtaatcgtcacatcaagaatcttctgtactgtctctgccacaacggaagcatggcttgtaatcttcacaccatgttttccctgcacaacctctgtcgtataggctcttgtgtaagccttatcatagtgggctttcttccattcagacttgatgtacatatcgttatctgttggagctctccaaatatttaattccatcggatggttcaagtattcccgccctgcgaatttcatctctgtaaagagtgcagtacgtttgtctatggtataagcaaattcacgccccttgatatgaatctgtgtatcattttcatttacctgtaattcagagtccactactgtttttggtatccatttctctgcaagtttacattttgtatcctctttacttacctcaatttcatcaaatccaagaatatggtctttatccaacagtggcaattcttttttcagatggtaaataagttttaaataacatttcccattctctggaacattgatcttcaggtttgtttttccttccccatgtggtgccacagaaaactccggaagtatgcctttgctgatcacaagaccatcctgtgtcagctcataactaatcttcacataatctttcaagtcatcaaaatccatgtagttatgaagcaccagttctccgctttctttgttataggaaataactcttgccgggcgataaacattcttgtattccaaaagtcctgtatgtaccgttctgtccggatatactaatccatccatacagaagttgccatcatgaatttcttcgccatggtcgcccccataagcatatatagtctttccattctcagcagttccatgagcaatcgcatggtcacaccattcccagacaaagccgccgcacattttatcattatcctgaatcatctggaagtaatcttcaaaatctccaggtccgtttcccatgctgtgacagtactctaccaaaaggaagggtttgcttccatctttatccagatattcctgaatttcggaaagcgctgggtacatccggctgtacacatccagattgctgtaatcatatgtttcatcataattacggtatcttgcactctcatattgtgtgatacgttctggatcaaaattctttgtccattccagtgctttttcaaagttgcagccataagcactctcatttcccattgaccacataacaatacagaaacggtttttgtcacgttccaccatgagttttacgcgatcaacgattgcctcttcccataccggatcatctgcaatcttctcattccatcgtttaaaccgattgtaatcagtgtcttcttttctatagatcataaatggaccatgagcttcaatatctgcttcatctattaccatgaatccatacttgtcacacatttcatagaaaaatggtgcgttcggatagtggctggaacggatcgcattaaaattatgctgcttcattaacgtaagatcggttgtaatctgttccggattgattgtaaatccagtaaccggatcagaatcatgtcgattgacaccacggaatttaatcttctgtccatttaaataaataacctggtctttaatctctatctttcttaatgcaatgtgatctacaattacttcattctctgtctcaagaatcagtttatatagatatggattttctgtattccaaagttccggacttgcgatttctaatacagctgttccttcttcagcaatacttcctagtgctacaactgctccgtttctatcttcaatcgaaatttttacatttaacggagagtagaatttcatttcaatttctactttcgcaagcatatcctcaattcttgttttaatatgataatcactgattgcctgttttgggcgtttcaaaatgtacacatcccggaaaataccactcatacggaatttgtcctgatcttccaaataggaaccatcacaccacttcattaccaacactgccaccgtattcgttccatcctgaagtacatcggtaacatcaaactcactggtcatatgcgaaacctggctgtatcctatgtaagagccattgatccatacgtaaaagcaactgtctactccttcaaagttcaaaaaagattttggcgctttctcatctctactgtactcaaaagtatgtacatagactccacacggaatgtcctgtggcacatatggtggatcaaacggaaatggataccggatgtttgtatactggtgtgtatcatatccagccatctgccatacacttggaacctgaatctcatcaaaattttctgtatcataattcttctcaaagaaagaatcctgaatgtcatagatgctgttaaaatactggaatttccaagttccattcaataactgcatacgatctgactcttctctgtgttccaccaagttatccattcttctggatgccggaatataataggctctggctggcattgtgttttcgtgcagtacgcttagattttcataataacgtggtacgatcataaatagctctcctccaatacatatacttttttgttctttgttttcctaaagaaaaccttatactttactttttgtttacgttccttagttatgctatatatatagcttatcctaattcgcaaaatatgtctatgaattggattagacaaaatatgcactaaatgatacaatgataaaaagtacgaaaagaggtgctgtcctatgtatttgaacaccggttatttgaaccactcacatatggatttcaaagacaaaagtcgtccgctgattgtaggtagctgtggtacttaccgtctttccagacatcccaaacttccgacctaccgtccaaagggtcgtctggattatcagattatatatatcactgctggttgtgggcattttcattttgataatgtaaataatgaaacgattgttccagccggcaacattgtactgtacagaccgaaagaactccaaaaatatgaatattacggagaagataagacagaagtatactggattcacttcacaggaagcaatgtaaaaaatatcttacgtcaatatgggtttccggataaagaacgtgtctttcaagtgggtacatctaatgaatatgaacaaattttcaaacgtatcattatcgagctgcaacgctgtcaagacaattatgaggaaatgcttgtccttttgctacgtcatcttctgatcagtttccaccgggaactgacaagagagcacatattaaaaaatgaataccttgatcatgagatggataatgctgttacctttttcagtgaaaactacaatcaaaatatcaatattgatgattatgctgcctcacgaggcatgagtgtcagctggtttatccgaaatttcaaaaaatataccggttctacaccaatgcaattcattgtgggaatccgcatcaacaatgctcagatgttacttgaaacaacaacttattccatccatgagatttctaagattgtcggatatgataaccagctttatttcagtcggctttttcacaagttgaaaggatattcgccgagagaataccgaaaaataagaaataggttatgaaatctataatgtcataaaaagtgaactactcggcaacttagttaccagagcatctgaaatctggcgggataccgccttttttcagggtacgtccatgacaccaatactgcttgcctttcggctatacagctacttttattatttctggattttttagtccggttacggacagtgtcttctcttttccggatgcggaaagatatttccgcaggatattaaatgcgcctactgcatctgcattgtagcttactccttcagttatatacatgccccgttcttttcggtttgttgcttctgcatatctttttgatacttccggtgataacggactgcactggctggtatagctttcctcctgttttatcaattggatcccatacagtttcagcttatatcccagcatgatatacagcttgttatatggcagtccgtgaaacttctggttgaccttatgccccatatccttctctttacggatatttcggatatctcccacaaccacacagcggatatcttcttttctgcagtattctgcaatccatctggtcactttatgaagataatccttcactgtattctgcttttttctgtaaagtctctggatatgtttcgatgatcttggatattttatccctctttccgattgctgcgcataccagacagactgcactctggcgatctctttatgaaagtatctttccaatgaaagatatctccttccaaggataaaagtccgaccgtttccggaatcataacaggtcatcagattatgaagtccaggatcaatagataaataatgtccattctgggaaagctgctctgtcccttcgatctcatagataacgataaggtcacattttccgttttccggcggatagatccgcaattgttttatatgatccatgtccctgaaaatcttattttcaagatatagaaatctttcatggatcccgtaggtttcttccatatagcttttcagatcctttggcagagacagccgcaaccgatctgaacctttctcatgccggatccccatctgcatgtatgtgaccgggatattgtcctgtttaaaacggggcggatttggatctttgacccctccggtctttttcaggacataaaaagatctccatgctttgtccagctgtttgcagatctcctgtgctatctgtgacggaagctgtctgtaccacagatctcctttatgcgcttttttctgataataccagtcaggatacttttccagtcccagctctttataatgatgacgttcgtagttgcagacattccagagtttggaagctgcataacacatatgccctatgatattggaatattccggccggatctttacagatgttctgtgtgacagcagcattcctcttccccctttggacagctatgcagatagaaatctacactccaccttggtttaatacgacttgctctgatgctcaatataacggcggatattctcctcagatacagatccgatcgtttccacataataggaatggttccacagctctcccttccatagctggtctcttatttcctgaaaacgttcgaacagttttctaccggtgatccccttcagatacttgacgatcgctgttatggacagctttggtggagctgatacaaaacagtggacatgatcaccttcaccacattcaaataaatgaacggtaaaacctttatcctcagcgatctgctgcaccagttcctttaggtattcctcaatttctgggtttaatatcttccgccggtatttcaccgaccacaccatatggtaattaatattacacacacaagtcctgtaatgtattagattttctttcatacatatagtataacataacgaataaaaatgcgcagcaaaaatcgaacatattttcgaatgattatatgccggttacggcattaatatcaagggattgggagattattatattatttcaatgtgcagatatgcacaatcttgcgctttcatctcggtaattgaattgccgaggattcccgcttattgtcctaaatgccaaaaaaggatgccaacgaatcaaatcagattacgtgacatcctcttctttttattagtgctattttataaattcaaccgaatagtaatacatgtactcattatctgtatctatatgctcccctgcaatatcctgtattggcaacgagcttaatcctttttctccataaatcagtgctgctaatccttgctctgttccatactctatcctgcatttgttttcaatagtcgttgctgatcttccataatattccctgtttttaactccctccaaaattggtatttctgtcatatattttgaatatttatctgctgcgatgagctttgcagtaaaattatcaaaatccggtgtaatgacaatcaatccatttgtggaagatttcacatcttcataggaaagttccaaaacttttttatgtgaaactcgttgtccaagctgatattctgacaagtaaatagataacgttttaaatgtatcccttgaattgtatcgaaacatcattgttccatcaattcctgataacaattcagcagttttcatttctatactatctgagtctactgcttcaatatagttttgtggttgtcgcaatttattacatacgatggatccaaaagtaaccatagatattcccactacaataagaagcactataatgattgaccagtttttcgatagcctgaggctagtctcctgtgggttgtattcggagtgtaatttgaaatgatccatacggttctccttgttgttctgaaatttgtggatatgtaaatactgcctgttactatatgtaaagagagtgcttttatctttattattgttgcttttacagtatatcattcagagtaaaaaaatttatccaaaaagcttcggctcattctcgatcaaatcttctgccagatattttgcatccatattttctattccataactatcatttgaaatttgttctgcaagtttactggaataaaatggatagttcacaatccacttgttaaaatgtgcttcactttttgcaataggcttaatatccgtgtcatgatccatattaaagtcataggtcatgtacgagagctgttgtgcatatgcctttaattccagatctgatatatctgccagaatcataatgtccacatcagaatccggacgaaagtcaccccttgcacatgaaccataaaggattatctggcgtacataggaaccatagatcttcttgatctcttctacatactgttcgattaaatcctgcatcatctttggcatatatcatccctcattttctactgatcattctatgctctgcttacttcttaattttattataaccagtttacccttgtttctcaatcagtattttccatgtatcaattttactgttactgagaacggagtgaacagtaacatcttctcagtttcccgtaaaaaaagctgcccgcatttacggacagcttttttggcgttatttacagttttctccttttttgtcagattccctcataccgtgcgatctgggaatagatgtaggaattgtaggtaagtcctggttcgtatcttctgtacaggaacataagctcgctggactgtttgctgtcaacagctttggatacatactcaacctgctgacgcagagatgcgaagtatgcctttgctgctgttgcaaaatattttctgtttgtattatcattctggccgtttgccagttttattcgcagattttccatctgggactgaagatatcttgtattacagatagtgatccatgccttattgtaagctgagatcgatggctggattccgctgaatgccttgcccaccagtttaaatccccattttgctacaagggtatagctggaagcacccagcttctgccccttccatacagtatttacgataccttttgttataagatcattggtaaggtctgctgtttcactcagaatatcatctgctatataatccaccgccatactgtagatatccttactgtaccactgttccagcttattcagtcctgtataaagaccactgtctgtcggaaccagatgcatcagctgtacgatctgatcatattctacatgcaggaccagcatccaggagatcacaaagtcataaaggtctaatccctttccaattgctttgttcgctttttcgatcttgccccagttatccgtaaacagtttaaatgcattattcagtttgctggcatctaccgctccatttaaaaactttgaggaaactgtccgggcaaactgataacgggttctcccgtccagtttaaagctttcacggatattcttggcttcaccgaaaaatccatttattactttcaacagatctgccagcgaatcatatcttctgttccagtcctcttcctgcatactctgaagaagttctctggccatctccatgttaagcttatcttcactgtagcttacaccggtaaaatgttcaaatatggcttttacattcggtgtgcctgcttccagctggctgatcagtgctgctgccatatcatcaaatttactttttgatgccattgcagtataggattcactctgcaattcttttgcaaccttgctgatctctgcatttccaaggtaatctgcatgatctgtaaggaattcttcttctgacatcttcacgaaacttgaaaggaagttttctccgtaaacataggaggtaaggcttgcgtttttaagtttttcattgcctgcgccccaggaaatggactgagtccatcctcttttgattccggcataagctgcttccgcaaggctttcgcagccctggaaagcattttttccgattctggtcacataaccgaaaacgtgtaccttgccgatagcccggcagttttcaaaagcagaatctccgatagtctccagatttaacggaagatacagcgctccccccattgtggtacatccggagaaagtatttgcttcaatgatagtaagctcgtaaggaagcctgatcatggtaagtgcagaacagttcataaacgctgcggctccaatggatgtaaccgtttccggtaattcgatatttttaagttttttacagttcttaaaggcatttgcgccgatcttcttaagtgcagaagaattgctgacctcactgaggctgctacagccctcaaatgcactggctccaatggtatttacgctggaaggaatgcttacggacgttatcgtcgtattgttcttaaacagtcccgcccccagtgctgttacttttcttgcagaggaagctatgctcaggcttgacggaataccgaccttggaattctttccataatatcttaccagggttatggttccgttattgttctgttcataagcccattccttgccgtaaacggcaaaaccgttcacctccaccgtaatggttttggttgtctttgggtaaacatgatgcttactctcttttgcggtgagcctgatggtgatctttcctctaccctttgccgtaagcttgtctccgccggtgatccatgcttctccatttaatccggatgcattcacgctgcaggtaactgccgcctcatccagtgccttgactcttaatggcttcgccagaagttcgccggaggtaacataggtattggcttttgtaccttttttcattccgtccggatttaaggtaatgttctgttttccctgaagaaccgcaagagcctttttggatactgccttgtaatgctttgtggcgcctacatttacggtaatataagaatatcccgtcttctgaagtgtcgccttacttccgtttagctttgcaacggaagaattgctgctcttaaaggtgatcttcggtttatctgccttacctccgttgatctttgtggaaatggtgaacgtttttcctttattgccggctcctttgatcacattggataccttcagtgtacgtgcagccttattgatcttgaaatttttctttacagattttgatcctgcaaaagcacccgatcccttaatagtcacacttccggttcccggctctttgcttttggtcgatgccttataatccttaccggattttaaggttataccgttaaattttaccgttacctttggaagggatgcctttccgttccaggtacggcttccaacggtgatctttgccttggtcagatctgcttttgcccagtgtgcgtataatgtcaaatcctcgggcagaagtaataaagacttggaagtgatcttcgtgccgccttttcctgctctggtataccatcccaggaaataatatcccttatagacaggtaccggaagggttccgaatgcctctccctttttcaggagctttgtcttctgtttctccgacagcactgcttttttcgcatttttgttgaatgtgatcttaaagtttaatttttctgtggttcctacggaaacaaacttgaatgagtggtcctttgcgtagctttctgcataggatcctgtatatccgtaaatggcaaaattttctgatacgccatcaaaaaggctatcattcagctttgtaaccccggaagggatcgtagcattcttcagggaactgcactccgcaaaaatattggagcctgttccatttgcaatattccgggaaggaaatgtgatcttctccagtgccgtgcatgctttaaagacctcagatcccatatagaccagcgattccggaagctggatttccttcagcgcactgcatttcagaaatgcatcattgtcgatctgtgttacgttctttggaatattcacctttgtaagccctgtacagccgctgaaggcataggactcaatttttttcactgtatccgggatctctacggtttcaaggcctttacagttctcaaaaatgctgtagggaacattatcgattccctttgcgaatgtaacctttttaagattggaacaatctacaaaaggtcctgcttcccggtaagcagtatcaacacctgccggcacattgatctcgttaaggcctgtacagcctccaaaggcacttcctccaagaaattccagtccttccggaaatacgatcctgtcaatatttttacagccatagaacgcagaaccattgatgactttcagggatgccggaagttcacttctgctcagcttcagatccgtacagttccagaatgcatctgcatcgatagattccaggtttttgggcagtgtgatctctttaagatatccgcagttacagaatgcccgatagccgattttttttacggaatccggcagaaccacttcctccagcatgagcattgaccccggtgaataaaaaatacctctcgggatttcttccattccctgctcaaatgtaaccttcttaagtgtcgtcagacctgcaaacggtcctccccatgctctgttggctgcggtataatcctctgttttcatctgtggcggaatattgatttctgtaagactggtttcgctgaacgcactgcctcttaaaaccttcagtgtggaaggcagctggatcttgctcagacttttacagttattaaaggctcctgcttcgatagactcaagctttgcggaaagatggacatctttcagattgacgcagctgttaaacgcatttttttcgatatttgtcacactgtccggtatattgatactgagaagcccggtacagcttaaaaagaatcccttggggatcgaggtaatgccttctccgaaggttacattccgcagtgcgctgcatcgtgcaaatacgcctgcataggccggactttccccgatggctccatccgcctttacagatgccggtatatgaacagaattcagtgccgtacagccctgaaaaacaccggcacagatggtaactccattatccggaagtgaaatactgcgaacagaagtacagccgctgaaggcttccctttccactctcttcaccgttgacggaatgaccacctcagtcatgttaatgcagttcgcataggctcctcctgcgatctccgtaaccggatagcctgcgatacttgaagggatctttccgtctgtctgctgacagcggtcctccccggtctttttcccgtctttgtcaaaatgctgatcatagaccactgaaaggatcgttacttccccattggataccttatagttaagtccgttccagacgcctgtggtacctgcgccggcttcttctgtctggccatcctcaaaagcagattcctgttctccgtcagccggctctggcagaagctcctgtgtttcttcctcctctgtcatttcctctgatggctgaatttcttccgcttcaccagtgtccgtgttttcgtcggaaaggatatcttcctgtacctcctcttctccggcttcttctgtgtctgcttccggttcttcttcaatttcttctgtttccggtttctcttccgtgtacagagagttttcttcaccggaagtaaactctgccgcatttgccagccacggtgtatacacacttgttgccagcattgtcactgtcagaagcagtgccagttttctcttcatcttactctcctcctttttctttttcataaatatttatgggaatggtttattcccgttcaaagacgactttgccgccaagaactgtcatatccaccttcaccgtcttgatctcatcgggatcaatggaataaatatctttctcaagaactacaagatccgcgtttttcccggtttcaatcgttccgttctccttctctgtataggaagcgtaagctgcgttttttgtaaaaagcttcaccgcctcatctacagacattttttcggatgggatccagccttcctgtggctgaccactgatatttttgcgggtgactgcaaaataaatattctccatggcatcaaatcttaccacaggagcatccgagccgccggacgtatggattcccatatccagcatactcttccatgcatacaccttatccatacggtgtgcgccgatggcaggttccactgtgttcatatccagatcgataaataccggctggatatatgccagaagatcctggtctttcatcccctgcaaaatacgcggattggtgatctggcaatgtacgataccatgtctgccctttttattatccttccggtaaggagatttcgcagctgcctcaatgaccatatccatggcacgatcgccgatacagtgtaccgctgcctgcatctgatgccggtcaaaaaaagcaaacagatcgtcaagctcctcctgactgaatgtgatgatcccggtatttcccggcgaatcctcgtaaggatcattcatggccgcagttcttgcaccaagggaaccatcctggatcagcttcattggtccgacagtaaagtgatcccccctctgtccggtacgatatccttcctcaataaaagccttcgcatcctccgcccgctcaaaaaggcactgctcataatggcggatactcagctcccctctggcatccagtgccttgtaggaggccatgatccgacgccagtttttccccggaagtgaggcaagatcatcggactgtacacctgtaaatccacattcattcagcttcttcgcactgtatttgatgtagccttccacttcttcctgggatggtgcttccaatacggaagaataaaactgtactgcattttccttcagaagtccggtatccaggtcaacctccttcgcaatctccgggaactccgggatttttttcagaagctccagaccgcagctgttgcacacagccacatgcccgcagacacgcaccataatgatggggatttccgttgagagcgcatccagctcatccttgtgcggatagcgtggcttatcaaaatgctcctcattccagcctctgcagtaaagccaggtcagcttctgacctttgctctcctccagtcttttttttgctgcggcaagcatttcctcaacacttgtacagtcaaacagttttacagatctttccacaaatgcataatgcagcatatgcatatgtgtatccacaaaaccgggcagcatcagccttcccttaaggtcgatccgttttttgcaggaaaaagcttccgcttctttatcagttcccacaaaaacgatccggccattttcgattcccacagcctctgccactttttcactgtcatccagtgttcttatacatccgttaaaaaaaattgtatccactgtttatttttcctctttttcttttttatcctcgtagaaaagtgccatatccttatctactttaccgattcccatgtaacgcgccttgtaatccttcagcagtttaaagaaggtaccacttaagataaataatgtggcaacatttacaaatgtagggaatacggttgtaaagtctgcaattacccacagctgtgccggtgttccgtttccgtaaagagtaagcactgtgaccagaagaccccataatggtgttccaaggataaaaatcttctctgcgatcttcagaaccttctgattgtttttcagccagtgcttcaggatcacgctgtagtaggtgaaccatccggttgatgttgtcagtccgaaaaggaaaatactgatcgcgatcaatgctctcgcaacagagcccattccggactcaaatgctgtcagtgtcagctcggacccctgaagtcctgaattccagtagcctgtggtgataacgacaagacctgtcatggagcagactacgatagtatctgcaaatacctcaaatgctcccatcagtccctgttttacaggatggtctgtctttgcggaagcatggatcattggagatgttccccagcctgcctcgttgctgtatacggaacgggcaaagccaagacgcattgctgttgcaacaccggctcccataaatccgccgactgccgcctgtgttgtaaatgcacccttgaagatcagtccaaaggtttccggcagcttgtcaaaattcactaccagtattgcgagagagcctacaatgtaaagcatgcacatgatcggtgtcatataggaagagatcacgccgactttctttacaccgccgatgatgatcagataaatcgctgccacatacaaaagtgacggtacgatgtacggcaggtggaaggtacttccgacagcctctgatactgtataattctgcaaagtaatgaaccatgtcatgaaaatacagccgccgaacagtactgcaaaaagtttccagaaaggaagctttttctctccgccaagccccttctgcatgtagtaggtcgggcctccctggtactcaccgtttggctgtttctctctgtagtatacagcaagtgttacctctgccatcttgatgaccatggcaagaagcgctgcgatccagagccagaataatgccccaggtcctcctgttgcaatagccgttgcaacaccggacatattggatacaccaacagtacctccgatcgcaatggaaatagcctggaacggtgtcaggctctttccgtcatctccgccttcctggcgacgttctttactgaacatgtttttcacaatgtaaccaaaatggcgaaactggaagaaaccggaacgtactgtcagatatacgcctgtagcgaggatcgtgatcagcagcggcagtccccagagccagttggtcagattttcaaataattcaaacatcttttcctctcctgtccttcttattttttgtcttttgcatccattcggaaaatctgtgtatagaatataaaaaatccccggaacacgaagtcagatacggatacccggtgttcccgacatacagctcttctgccatatatctgcgagccccgtttctatcctctttatccttcatgctctggggatcttacatttcagcccacgaatcttccaaacgatgacagtatatcacagttccggaggaatttctactttttctgtttgaattttgtatttttattcatttttcgtgaatattactattttaccgtatggattccggatactccaccccttccggcatggaatcccattcgttaaggccaaggctctgcttgaatttcgcctgttcaagcgtaagcgtcgggagatcatccagcagataatccatcagctcgctgatgccttccctggtcttgttatttaccataaagattctctcacagcccatgttctccatccactgtctgaccatgggaatgttggcatggggagaatccaccttggtgatgatcccgatcagcggccgtagtagaaaattcctgctgccgtcactaaacaggttaaagggctcattggctgcctgtacaatggcgatcacatccgcctcaaaggaaaagcaggccagtcctacgctgaaatgcttggattccgcatattctcccggtgaatcaatagtatcttcatttgtattggtatactgagtcttatgataatgaagctcttcccctttaagtgcctgtgtcagggatgttttgccggcttcacttcgacccatcagaaaaatttttttcattttttatcccgtcctgcctcagctcctgtggatcttacagacatcgaatttcaatgtctcatggaaaaatcgtaccacttcctccacggctgtcatcacttccgtaaaaccgcctgtcaggatcagcgtcccgcagaaacgatccataaatcctacttccacatgagctgccttcactgcaacatctgccgcaaccacgattgcctcccagggtgtgacacggaccatgccgatggcatctccactgtgatcttcaccttcatgaacaccgatatgtaacgcaagattctcatatatcgatctgtcatttggtgtaaaaacatgtgcaaaggaaagctcctttccaggtactctcacccgggtcagccgaagtcttcttcccttaaggttctcataatcatcatgaaacagcctctccagcagttcttccttcgttatccgttcttccatggtacacttccttatctcttggtgatattgcatactacatatcccagagtatcacggaaataatccacgatctcctccattgcagtctgcacatcggaaatctctcctgttatgatcagtgttcctgtaaaacggtctgcaaatccaagatacacattaccgctcttcacagcaatatcggatgcgatcacagcagactcggaaggtgtcatgttcatgataccaattgcagatgatccatagtccacctgcggattcagtccaagcttctgatatatgataggtgccggaccacccatgatatgggcaaatgtgatctccttaccggctacggtttcctgtacgattctgatctgatctctatgttcatccgccattgatgattcctcgctttcaaaattttatattattctcgatctgataatattggataattttataagccggatttcattcatccggcttacagcttcctaaagtcaggcagatctttgaaatccgctctgctacctgctcatggtcaaaaaacagtctggcagttcatctgatttaattttactatttaccaattttaatgtcaagacaattcttcgaaaacaagtcaaaaaacaacgttttcaaaaatagaaatccacaaaaaacaacatttattttcaaatcctcgcggaaaaccagtcagaaatctgctcagaactcaaacaccttcttaatactgtcataatgtaggaattttccctctgcggcaaacgcccggatctgctccagggttgcaaacatatatccgtctgtctcttctgtctgaagcttcagatccttatcctccacatccatgacaaaacggtacacatccacaaagtaattatctccttcccccgggttctctcttttatatgtaaaaaggtatccgccctctgcctcactggcgtccagtccggtctcctcttttacctcacggagtactgcatcacgggaagcctctcctgcctgggctgcaccgccggaaacctcccaccagcccggagcccaggcctttgtcatcacacgtttagtaataagaaaggtcttgtccggtcttgctaccacgcccaaaactgtcagatgatactctccatcctttaaacaccagtcattgcgcttcatagttcgtcctgtcggtttcttatctgcatcgtaaatatcccagaattccattttatctatctcctgtctttttacagaacgcggaaatacattcttacatttgatccatttcagcctgcccgtttctccgttttctgtatcttttttatttgttatgataacacgttaaaatcatatatgtaaacccctggatccgataccattttccagttagcgttaccgttcactccgttctcagtaaccagttacccttctacatctgttttttttcacattataagcatgcaagcacctgcagcctgaaagatgatatgtaaaaatctatagattatttttattatattgcttgtattatgaattagttttatagattattctgttatataattaacacaaacaaacgattctatttaaaataaccagggaggtttttttcagatgaagaatgattatccgcatattttttccccattaaccgttaaaaatatgactatcaagaaccgtattgttatgatgccgatgggcaccaactacggtgaacagaacggcgaaatgagttttcttcatatcaattattatgagcagcgtgcaaagggtggcacaggtctcatcatcgtagagaacgcaagtatcgattccccgcagggctccaacggaaccacacagctgcgcatcgatcatgacaactatctgccacgtcttttcaaattctgtgaaaatattcatagatacggaacaaagatcgcgatccagatcaaccatgccggagcttccgctgtttcttccaggatcaacatgcagccggtttccgcatctgacgttccatccaaagaaggcggcgagatcccgcgacctctttccaaagacgagatccttcacatcgtaaaaaaatacggtgaggctgcaaaacgtgcacagacagctggctttgacgcggtagagatccatgcaggacactcctatctgatcagtcagttcctctccccgatcacaaacaagcgtaccgatgagttcggcggatctgttgagaaccgtacccgtttctgccgtatggtcatcgatgaggtaaggaaacaggtaggacctttcttcccgatcatgctccgtctcagtgcggatgagctgatggaaggcggaaatacactggaggatactctggaatacctggagcatcttcaggaagaggttgatatctttgatgtttcctgcggacttaacggttccatccagtaccagatcgatgcaaattatctcccggacggatggcgttcctacatggcaaaggccgtaagagaaaaattcaacaagccatgtatctccatgggtaatgtccgtgacccgaaggttgctgagcgtatcctggctgacggtgatgcagacttgatcggtatgggccgtggtctgatcgcagaccctgcatgggtaaacaaggttgccacaggtcatgagtgtgacctccgcaaatgtatctcctgtaacgttggctgtgccggaaaccgtatcggtgtaaaccgtccgatccgctgtactgtaaacccatctgttcttgagggcgatgtatataagaaaaaacatgtaaataaaaactgcaacgtagtcgttatcggcggcggcactgccggactggaagctgcctgtacagccgcagaggttggatgcaataccttccttctggaaaaaggcaatgagcttggcggacttgcatctctgatctcaaagatccctgcaaagaaccgtcttgctgatttccctcactatctcatgcatcgtgctgaacagcttgataatctttacatcttcaaaaacacagaaggaacaccggaaaacatccgcaagttccatccgaatatcatcgtaagctccaccggctccgctccgcttctgcctccgatcgcaggactgaaggatcgtattgacaacgagaaccataatatttattctattcttggtatgatcagccacattaatgattttccgaaggatctggaaggcaaaaaggttgttgttgtaggcggcggtgctgtaggtcttgatgttgtggaattctttgctgacagaaacgcagacatctctatcgttgagatgatggatcagatcggacgtgatcttgacccggtaagcaaaaatgacacaaagaccatgatgaaaaaacacaatgtacatcagcttacaaaaactgctctccttgaggttaaggattcttccttccttgtcaaaggcgacggtgagccttatgagcttccatttgagtacggcttcgtatgtctcggaatgagagctcagggacagctttaccagaacctcacagaggaattttcttctgaggatgttgagatcatgaacatcggcgacagccagagagcaagacgaatcattgacggtacccaggaaggacgtaatatccttaccgttcttgagcagaagggatacctttaatatttttccgctataccctttccgggaacatttcaatccttctcccggaaagtgtatatagatctgttacagttcactcggtgatccgtaacatagattttccacgtcttcctcccccgcagccgtccggagaatgtccgcaacttcttcagatctatgtggtgggaggtttaaaaaagacaaatcttcatccagattttaccaatgagaggagttattaccatgtcagaaagaatcacaggacataccgaactgattggtcttatggcatatccgatccgccactccagctctcctgccatgcagaatgaagcttttgcaaagcttggctatgattatgcatatcttgcatttgaggttggtgcagacgagatcgaggatgctgtaaaagcaatccgtactctgaaaatgagaggttccaacgtttccatgccgaacaaaactctggtaggccagtaccttgacgagctttcaccggcagcagaaatgtgcggcgctgtaaacaccatcgttaatgatcatggtcatcttacaggccatatcacagacggtatcggatttatggcagcactgaaagacaataacatcgacgccatcggaaagaaaatgaccatcgtaggtgcaggtggtgccgcaactgctatcgagatccaggcagcacttgacggtgtaggcgagatcgtgatcttcaaccgcaaagatgaattctgggaccgtgcagtatctacggtagaaaagatcaacaccagaacttcaagccatgctgttctctatgatctggcagatcttgaccagctgaaaaaagaaatggctgacagttatattttcgtaaatgcgacaggtgttggaatgaaaccactggaaggtcagtccgttgttccggacaagtcttacttccgcccggagcttatcgttgttgacgtgccttactcccctcttgaaactgctatgcgttctatggcaaaggaagttggctgcaagacaatgaacggccttggcatgatgcttttccagggctccgctgcatttgaactgtggaccggcgaaccgatgccgatcgaacatatgaaagagattcttaacattagatacgacgactaaactgctatctgttcctgtcgtatcagaaaggaccattatgaaaacagttcaggtaagaaatatcacactcggagagggaaggccgaagatctgtgtcccgatcgtgggacagacaaaggatgatatcctccttgaggcagggaccttcgcaaggatccccgtagacgttgtggaatggcgtgttgactggtttgaggacgtttttgacacagacaaggttctggatgtggcaaaagatctccagaccgttttaaaggacactccgatcctcttcaccttccgtactgcaaaggaaggcggagaaaaagcgatctccaacgaaacttacaaagcactcaacatggctgtcgcaaaaagcggctatgtagatctcattgatgtagaagccttcacaggtgaggaaatcgtaaaaagcatgatccaggaagcacacagctatggcgtaaaggtcatcgcttccaaccatgattttgacgcaactcctgagaaggatgagatcgtgcgccgtcttcgcatgatgcaggactatggcgcagatatcccgaaaatggctgttatgccaagaaacaaacaggacgtgcttacactcttaagtgccacgctggaaatgtccgagcagttcgccgaccgcccgatcattaccatgtccatggcaggtaccggtgttgtcagccgtctcgctggcgaaaccttcggttccgcccttaccttcggtgcagctaccaaagcttccgcaccgggacagatcaatgtcaacgagcttgcacaggttcttgacattatccacaaaagcctgtgatcctgtaacctcccataaaaaggatctacggtagatttttgtaacagaacgcgaattataaaccaatttttaaacccaattgatgtaacaaattattgcaattttaatcccataatagcaaatctattaaaataataattaaaaacaacaaatctcatgatcgagtaggaggcggtgactaaccgccgtcctctcacaccaccgtgcataccgctcggtacacggcggtttcaatagttgacgtgcatggactgataggctgtggctaaatcataaaagccccagtttatcagtctttcttttgttagtgctcgtttgaccactcctgcatttgccattctccaataagcttttcggctgtaggctccttcacaggctgcccattctggcattcccaaccccatcagcttccgttttcgtgtctttggcagtttccactgtttccagatacacattcgtatccttcgatacagccacctgttcagcctttcgacgttgtttttcatgtctgccatactgtaatagttcagccatcctcgcatatattcttttatacgttccatggtctttactatacttccgcacctgctccgggaagtgagctttctcagcttctccttggctttcttccatgactttccatggacacggacatagattccttttccgctcttcccgaaacagaagccaaggtacttaaaatttcttattgcaaacacactgaccgtacgacttttctctcggttcacctttagtttcagtatcccttccagatatttcgtactgctttccaacaaccgttcggatgcacgttcgctcttcgctagcaatacgatatcatctgcatagcgaatgcacggtactcctcttttgttgaactcctggtcaaactcgttaagatatacattggctaacagtggggagagatttcctccctgtggtgatccttcttccgtcttaacgactacaccgttttccatcactccacttctaagatacctctttatcatctgtattacacgttcatcctttacatctctgcgcaggatatttacaagtaactcatggttcagtgtatcgaaatactttgacaggtctaggactactgcttttgtatatccctgttctgcatactcctctatcctctgaactgcgtctttcgcactccgtcccggacgatatccgaaacttccatccgaaaactttggctcataaatcggtatcagctgttgtgacattgcctgttggatgatacggtctatgacagtcggaataccaagttttcgtactcctccgtctgatttgggaatttccactcgtctcacaggcgatggggtataatgcccctttcgaatctgttctgtcagttcgtggttatgttcctttatccactggaacgcctcttcaatggtcatcccatctactcccggcgctcccttgtttgccttcactcttttgtaagctctgtttaggttgtccttattcagtatcttacctaagatatccggctctgcactgtccctttctttccatatccggttgaatgagcggtgcgctcttacataccctttacgttccgcgctatctctctgcaagcagctttccttgttttctgcatccatctgctcatttctcctttccgggtcatacttgagactcctattgattcagtccttcacctctcggctactatgacctctgctgacttctgtgcgttcagcactgcttttggcagtggttacctctttcgaggcatgtcgcgcagacctccccgggtatcacacgcttctttctctccatctatctgccacatctattccgcatgattccgtgtagttattgggctttgacttgttgtgcagccttaccctcatgcaaaaccttatatgtgatttctgttcgtcagaccagagatttgcccgtggttagtttattcccacatccggcttccttcagattccacctcacgatggacacccttgccttcggctatatccttcccactaccaggcggattcgggacttgcacccgttagaaacgtgcgccgccgggcgcacacaaaaagaagaagtgtgctgacccatccagcacacttcttctttttctgttttttatatctttgttattcctctgatcaatttttatcctcgatggcattctcctctttctttctggggtcccagtttgaaaggaagatattcaggccgaagcctacagccagggcccatgcggatgcccatgcagttccctgggttgcaagcacagctgccataacacctgcgatcatcttgtcacggtctgttctgcagtaatccataccgatccttgcacagacaaaggcctggaacatcagagtaatggaggaaccgactccgaagatcggacggaagaagcttacaaccggaatgatcagcacacttaaaaacgttgcaatacggaaggatgccataccgccgatcagagacttcatagctttctttccctccttgtaacggatggaaacagatactgtcattccaacccataacggaccggaaagcggcggaaacggcgcaatgacggaaaggatcaggttcctgatgccgctgaccaggttggaacggctggaattgaaatcaatgtactcatcatctctggactggcgtgcctctgtaaccagtgtctctgtggtaacaaaatcaccaaatgcgataacatagcatacaagtgccagaggaagcgctttgacaaacatggagaccggcgggattcccacaccaaagatacttacctgtgagatgatctctttgaactgcgggatcttgataaaggttcccagctccaaaccaggcgcatccagttctcctacaagaagacctaccaccatggcgatcagatacgggaaaaggtttccatacctggcaacaagatccaggaatttgttgttcattctcttctcctgatatttatctgaaaagctgatcaggatcagaaggcctacaccggcaacgatcgccagcggatacttatgcatgttgccgccctctcccagctgtcctgccataaccgtcaccggcgcagcaagaaggataccacccttaacagaatttggtactgcatggacaaatttatccgcaagcttggtgatgcccataaatatgaacacgagaccaaccagcatctgcagggcgatcattgcctggatacgttcttttcccatagggaagccttccaggaatacaatcgtcagcggaagggtcggtgtgatccatcccggtacaaccggatcaccaagtaagctgtgtagcatatacagcatggtctctatgatcacacagctccatgccagctcataaggcaatcccagatattgttccagataaggaaccgccgccagtgccgtaaccccgaggatcaggccctggataaactctacggactcaattttatagtgaataaacggaaaacgaatctgaaatggcccaaacggaatgtagggcagttcgttttctcttcgctgtcttgctgcacgtgccataacgattctcctttgtcgttttttttgataatacatatatagtatcttttattttgtaagtttgttaattaacaaacatttccagaaacggtaaagtccaatccgggaattgttcccgaattggaactttgttttgcacagattcagtcatcattgtctgtatccatacaatgattcactttttttactgtagtcaaacggatattcatcccaagggatttccttgattcagtcaagcctcttttccacggttcatcttaacgaacagtgcaagaaggattcctatgaatgtcactgccatattgagaagcaggatcattctcggagcactggttccggcagtctttgtaatgtagccggccaatgtcagaatggtgtagttcgcaacgctggatgcgatcatgaccatggatgttgcagttcccttgttttccgggaagaactccgcagttgtggaaacagccagctgaagcacaccgcctgcgcctgcaaaaccgatcacaaatccaccgataagacagattgtcggattctggataaagtagcaaagtcccagcatgatgaaagagatcagcggataaatgatcaggatattgatctccttcagtccttttttgataaatacagaggaacacagaattgctgcaaaggttcctactgcatagaaggactggatcttggaaggatcacttaagttataaagctttccgagctcctggttacagttcagccacagcatgaatgtagaagagcttgtaaatccgatgagaattgctgcaagagctgcaggagtgatctttaattttgctttttctttctttactgtacctgctgtatttctctccgggaatggcaggaacaggatcaggattccatcgataaagatcgcagcacctgcaacaataaagatggttctgtaggacatattcgccgctgctacaaatccgatgaggaaaggaagcagaaactggctgatacacatggagaattttgtaaacaggttcgctacagaaggattgtttacataaatctccatacatgtcgggcttacgcaggtgtccaggaaggagtttgcgataccgcctacaatggcaaaggcgtaggcaactcccatagacggagcaaatgcgattcccataaagtatgctgcatagcagatcacgccaatgatcccgcttaatctgcgtccgaatttgtcggacaggggaccggaaaacggaagagagatcagtcttccaagtccaagtgcggcaattacagatactaccatgctgacatccatagttccatcacttaaagcctttgctccccagtgagccgcaagctccggcttgtactgacccatgatggaagctccgattccatggatgaaatatgtaaaatacagcgcaatagaagtaatcactaaatttttcttacctgtctggctcatttttcttatttcccttcgttctcagcctgaaatttctggtactcatctgtcggcatctcaagacctgtgtaaagcttgtaagatgctgcaccctgccacagaagcattccttttccgcctacagcaagcttcacgcctgcttcttttgcttcttttaccatctttgtctctgccggattgtatacgcagtcagcaacaacaagatccttatggaacatggatttatcaaccagtgtgatgtcatcatgtggtttcattcctgcaagtgttccgttcgcgaggatatctgcgtttgcgatctcttctctcagtttgtcctggtcgtcaaggcaatatacgcttactttgcagtccggtacttcttttgcaagcttctcagcagttccttttgctctgtcaaggaatggatcgtcaggattgaagatcgcgatggatgcagctccgtcaagggcacactgtacagtaagggctgtagctgcaccgcctgctccgaggactaccatctttttaccctttacatcaacaccgtgctctttcagattgcggacaaatccgataccgtctgtgatatgtccaacaagttttccatcctcatttacgatagtatttacagcgccgatgatctttgctgccggtgaaagctcgtctacacactgagctactttgttcttgcaaggcatggttacattgcagcctctcattttgaacagacgcattgcatcaagagctgccggaacctgatcctctttgatatcaaatgccatgtaagcatagtccaggttatggtactggaagctgaagttgtacatagccggggatccggaatgtcctacagggcttccgatcagtgcaagtaaaccagttgttcctttaattctctgttccatttctttttacctcctgcattttcccctgtcagacaccggattatttttctccgatgtctgtcgggccatctttttaatctttatactgtccggtttatcggatagttattttcttttgtatcaatacgatcagcgactggcagatcagatcctggaagctacctcataagcctcttttgttgcatccagtgcacgtcttgcacggatagcatctccgatcacatgtgtctcaggtacaaggtctttgatcttctcttccagaggattgtagttgcggaatcccatggaaaggatcacagaatcatatcctcttgactcgtgacgtactccgtcagcggtctcatattctacaccgtcttcatagaatttgcatacctttgctccggtgatctccttgattccgtagtcctcgaaatccttcatcagatatactctgtgctcgtggatcacgtctgcacctacggtatcacggaactcgataacagttacatcatgctcctgctcgcctaaaaatgcagctgtctcgcatccaaccattccaccgccgacaacgagaacctttttgcctgctgctctcttgccatccagaaggtcagagccgtggatgatagccggattgtcgattccctcgatcggaaggatcagagtcttggaaccggtggcaatgatcacgctgtccggcttctcttctttgataagctccggagttacctcacagttcatcacgatcttaacgccatccttctggcagcgatggatgtagctgcggatcatgtttgtgatgtcaccttttcctggcggatatgcagcaagtctcatgtttccgccgagaacatctcctgcctcataaagtgttacctcatgtcctctctcttttgcaataaatgcagcggaaagtcctgcaacaccgccaccgataaccataaccttcttcggctcttccactttctcaagcggctctgcctcatgacccaggaatgggtttgtcagacagcataccggatttcctgcatacatgtttgcaacacagccctgaagacaggcgatacaaggagtcatatcctcaagacgctcttcctgtgctttcttcggcatagccggatctgcaaggctctgacgtccgaatgctacaaggtctgctcttccttcttttaccatcagttctgcaaactgtggctctgtataacgtccaactgtgatcaccgggatatttaccgcacgtttgatctcctcaacctctgctgcagagaatccaccgtggataacagtcggtgcccacataaactcatccttgatatgaacggcacgggatacatggagtccgtccagtccgcagctttccagatatgctgcgattgctgcactgtcgtggacatcaagtcctcccggaacctcatctgcacagttgattcttgcaagaactgcaatctttccctgtgttgcttttttaacttcctcgatgatcagacgggagaaacgcatacggttctcaaagcatccgccaaactcatccactctcttgtttgttctcggagaaaggaaggtacttaccagataaccgtgtgccatatggatctcaacagcatctgctcctgcttccattgctcttcttgctgcctcaccgtagcctttgatcagctcataaacttcctcagttgtaagctgcttcggaatatcacggccgcacactgacgggatactggttgctgctgtgatcggtgctcctgcgttctttgcatttccttccggacctgcgttctgaagctggatggacacctttgctccttctgcatgacatccgtcgataaccttgcggaagctctcgatcgtagagtcgtcataaagacatggtttacgcgggccgccctttgcgcccttgtgaactacagtagcctcgatggtgatcagaccaaatccgccttttgctctttctctgtaatatgcagcggactgctcactcattgttccgtctgtgtttgcaaagttatttcccattggcggaacaacaaaacgattctttactgtcataggaccgatctcgatcggctgaaacatcgcattgaatttcatatgcgttctcctttcctttgaaacaatctttttgtttctttcacggtaacgccctgtcaccggtatgacgtcggaaacaggggcccgtctgaaatattagtttcttatgttaattacagtacttccggccaagcctcttccagtaccttctttgtgttctcatatgtatgttttgcagcatactcgatacctttttcaaggtttgcatcgctgataacctctacgccgatggcatttggtctgatgcctttttctttgatcatttttacgaacggtactgttgttccgattcctgttccaggagcaagacggtcatgcatggactcatctcttaagatcgttgttgcatatggtctttcccatacatcgttgatctggatggatacgatcttgtctgccgggattccctcaagtacggaaagctcgatcggctggtttgctcttacccagtgccatgtatcaaggatcagtttcgcattcccgcagtcagcagcttttacaacagcccagccctttttcacatccgggattccgctgtatggcattggctcaacaccgatgatgtatttgcctgctctgtggcaaagctcacgaagtttctgtgctgtatactctacggaatagttctccatcagtccgcagttgatctgttttacgttaaataattcacacatatggaagcagagctgttctttgtatttctgctcataggaacgatgctcctctgcccactgcacgatgtactcaacctctgttaccttcatgtcatatttatccaggatcgccaagatatcctcgtcgaaaagtccctcattcagggcatctacgtaggtttctgctctcaggccgatcccctcatagccagcctctttggcagcttttacacggtcctcaaatttgcactgatctcccagtgtccaggaactgattgtgattggaaattcttttgacatgataattcctcctgaaaatttaaataattttatttgttttttttaaattattttgtatcttttttctataagcattatataactttgttaaatacaaaacaaattgattgtaccaggagaatccatagattttatcaatatatcatgttatactatataaaacatattcagccgtattgccgccgtcactgcatacggcccggcaaatctcttatgtctgtcagacttaccggggatctgttcgaagtaaaacattcagataaacttacgaaaggagtattgaaaaatgaatctgtatcatcttcgctatttcgtgacactggctcatctggaacattatacaaaagctgcggatgttctggccatcacacagcccagcctaagtcacgcgatctcttctctggaggaagagcttggagtgaaattatttgaaaaaaacggacggaatgtttctctcaccaaatatggcaagtcttttctggaggatgtggaacaaaccctgaaccggctggattcctccgtaaacggtctccagcttgcaggaaagggagaaggacagatcgatgtggcttttctcagaactctgggtgttgactttatgccaaagatcatccgcagctttcttaatgccaataagggaaaacagatccatttcaatctgttctgtgataaggttcttaccggcgatatcctcaccggactgaaagagaagaaatacgatatcggcttctgttccaaatttgacgacgaaccactgatcgaatttattccggttgccaagcaggatctggtcgtcatcgttccgccggaacatcctcttgctgagaaatccgagatccatctggaggaaacgcttccatacaagcagatcatcttcaagaagagaagcggtctccgccagatcattgaccagttatttaagagcatcggtcagtacccggatgtggcttttgagatcgatgaggatcaggttgccgcaggatttgttgccaatgatttcggcatctgcattgcaccggatatcccgatccttcactctctgaaccttaagatcctgccccttgtctctccaagctggcagcggaatttctacatggccatgctgaaggatgtataccatccgccggtcgtggaagcctttaaaaaatttgtgatcgaggaaacctcgagggagattttttataaaaccaattaaacgatctgttcatctgcaaatatatggtccggatcttttatatcataaaggacagctgcccgatctccgttctgtttctgtacggtttatcggacagctgtcccttttatatgtaaaactattctgttttatgatcagcagttatttatttgcctctgcctcacgaagtctgtggatcagctcctcgcagatctcaagctcactctttccgtctgtctcaacaactatatctgctgctgcctcatatttcgcgcgacgtttttccaacagatcagcgataaatgaaacatttttgttgttctcaagtaaaggacggtcatgattatcctttacacgttccagaatagtttccggctttgcagtcagaagtacaacacggccattttttttcatctcggtaacattgcgctcccgcatcggaacaccaccgccacaggatactacaacattagatctggactgcatctcgatcagaagatttgtctcgagctcacggaaatactcttcaccgtaagtctcaaagatatcggaaatgctcattccctgtctctccacgatacactgatccatctccacaacatccatggcaagaacattcttcagataatcggagatcgtagatttaccagctcccataaatccgatcaggaagatattataattgaaaagatttctggactgaatccttttactgttctgtgtgatgcttgcaaaaacatcattgacctctttcttatgacgtctgccttccattctggcttccagccatcctttctgcttcgcctcctgttccggctgaagtaccggaagatcgttagcttccttgtataccatgatgtcctctacgatcctgtttctcataaggagtgcgtccaggatgatctcatcgcactgtccaaggctttctcttaatacttctaactggttcataatatctcctttacttcgttcattttattacggatttccgtcatcactttatcactttaaatcaagtatctgtccttattataccaactggtcatttttatctcaacccaaattttcattgaatttacgcatgtgatctatagattatttttataatttttaggcacggcaaagatatctgacgcaggacttcacgctatgagggactgaattgtttgcagtaatttatggaattgctatagtattcacgcccggatctgcgtcaaaaaaatctccgccctattatagaagcagagattttttacagaaattttatcaccaagattctactgtatcacttcatagatccggtaatgcttgtatatataatcccggaactgctccacaagcgcacttggataccgttttttcatcattcccatgtatatgtaacgacggcagtgcagattctcaatatttaagattttcacaggaagtgtatgaatcaccggtacatccggcacaatgcctacaccaaattcctccgccaccatacctgccagtgcaccatcctcttctacctcaaaggccgtctccggtgaaagtccttccttttcgaaaagctcccggatcacaaaatacagtccgcttgcaggggtaaaggtcacctgcggatactgccccagctcttttatggtcactgaatttcggtctgcaagagcatggttctcaggcactacagccaccagcttttcttctgacaccggcacaaagctgatctccttctcaccctctgcccgggaacagaagatcacgtcgaatttctcttctttcagaccccggatcagacttccggtagctgcattctgaaaacggaaatcaatcttcttcccctcctgttcattaaggaacccccggacaagctccgggataaatctgcgtccctgggtatggatatacccgatggaaatacttcctcccggaatccttgccgcttcctgtatcctctccacaccaagattcaggatatgtaaggagtcctgcacatatttcagaaacatttccccgtatttggtcatggtcacatttcttccgtgacgctcaaaaagtggaacctgcagttccttttcaaggttggagatcgcatggctcaggcttggctgggttatatccagcctcttggctgctctggtataattttcgatctgggcaagagtcacaaaatatgtgagctgatttaagttcatatgtcaaaaaatcctttctttcctccgcgcgagagactttcaggcaggtaagctcagacacctcgctgcctggtctgtttcacactccaaggctcaggagttcttttcccgccgcaagtctctcataaaactgctcataaaaatcccgcttctcatcataaggcttcctgtaaaactggtttaccacatacatgttcaggtttcggatcagatcactgtcctcgctctcatagagaaccgactggacatccagaagaaaataatgccagtcacagacaaatttttcgtaatttcgaaaatccggagtatctacccatttccggaccttgatcttactgcggctggtctttttgcactcgtggatctgaagaatgtatttaaaaccaccgtcctcatagtatcttcccagcgggaacaaacggcagaagcccggacggaaactgtgaatggagcatcttccgttgccattcagaaatacgcatcgttcctctgcccctgtcatcctaagatgcggcagaatatttccgtctgtgacgccaagctctatttttccggcaagcagctggtccacacttaagtgaagtccctgacttaaccgccatacatccagcggatccagtacaacagaatctcccattcccgtacagcagtcaaaacagcccttacagtcctgacagtctgcctttaccatgtcatttgcctcgtataaacgaccgtcggaaatttcctccagtgtaacctcccgccgcattagacaagtgcctccagtcctgtaactccccagtcctcagccaggcttttcaacccgtccaggatctcctccctggaataatcgtgatcatccaggtaatctacgtccatatcattgagatgcagataaaaggtaagggcaagctccagataatccggatcatcttcctccatgttcataagaagctcattttccgctccgttgatgtcaccctcatcagcaagtccgataaccttcttaaaaagctggtctgcctctgtataatctgcctctgctgcaggaagtgtatactgcggcatatctcccttaagaagaagtcttgtgatcagtcttgcgatatcctgaatatttcctgacattctgtcatcctgtaatcccaaatcgttttcctctctttctgctgtcctgttctgccagacacatttctccgaccgacgtatctgcatccggtcctccgctcatccgaaccccggatatctggacaggcaatttatttaatccagtttaattcctgacaacgcctgcgcaaatgcattgttcaccggctcattggcctctttctgctgtttcttaagataacgctgcacatcacgcttattcacacctgcaccctctttggctcgtcttgcctggaaggatgaaagcttttctttatagccgcactgacatacaaaggtctcttcttttcccttcagaagcatctccatacgcttatggcatttcggacagcgcgcattggtggtcctggatactgtctctctgtatccgcattcccggtcctcgcacaccagcattttggcattctttccgttgactgccaggagatgtttgccgcagttggggcacttcttgtttgtcatattgtcatggcggaaggttccctgtccgcctttgatctcatctacgatctcacaggcatatttacggatccctgtgaggaatttatcctgacggagctttccgtttgcaatatcactgagcttcatctcccagtctgcggtaagctccggctttttcagttcttccggaaccagctccagaagctgtttcgccttggaggtaatgtagatctcattgcctcttttttccatcataaagctgttgaaaagcttctcaatgatgtccgctcttgtggctaccgttccaagtccaccggtctcaccaagggtttttgccgcttttttgtcgtggctttccataaaatgaaccggattttccatggcaccaagaagtgtggcctctgtaaatctggccggtggttttgttttgcctgctgtaagagctgctccttccacagtaagtatctgaccttccgtaagctccggaagcttctggtctttcagcttatccgatgaatcctcttcttcctcatcctgccagccgccttcgtagacttctctccatccggcgctttttacgatccgtccgcttgccgcaaaagtctctcctgctgccgttccttccatactaacctgctcatatacagccggcggatacagaacgcttaagaaacggcgcacaaccatatcgtagatcttccgctcctcgtttgtcatatgatccagctgtacaaactgttctgtaggaatgatggcatgatggtcactgactttcttatcgtctacaaaacttgcattggcctggattggtttattggccaacgcaccggcaagtttccggtaaggacctgtcccgcatgcctgaagacgttctttaatggtaggaacgacatcttttcctatatatctggaatccgttcttgggtaggtaaggactttgtgattctcgtagagcctctgcatgatattcagagtttcctttgcagaaaagccgtatttctgattggcttctctctgaagagtggtcaggtcataaagccccggcgcataggtcttcttcggctttctggaaacctttgttatggtaaggttgctttttcctgcctttgtctggatctcctgggcacgctccttcttaaaggtgcggaggcttccgctttttccgtcacgccaagtccagcgtacatttcccgcctgcagagtgatcccgtaataatcctccggcttaaattcccggatctcctgctctcttcttgcgatcatggcaagggtgggggtctgcacacgtccgcaggaaagctgggcattatatttacaggtcagcgctctggtcccgttcattcccaccagccagtccgcctccgccctggcctgtgccgcacggtaaagatcatcataatcatggccgtttttaaggtgggcaaagccgtcacggattgctttgtccgttacggatgagatccacagacgcttaataggtttatggcagtctgcctttgcaaggatccaccttgcaaccagttctccctctcgtccggcatctgtggcaatgatgatctccccgatatccttcctgtaaagctgggttttcaccgcattgtactgcttggaggtctggcgtatcaccaccagtttcattttctccggcatcatgggaagcgtggaaagctcccatttggtatattttttatcgtattcttccggatctgccagtgttaccagatgtcccagggcccaggtcactacatagtcttttccttccagggttccgttccccttctgactacagtggaggactctggcaatgtctctggcaacggatggcttctccgcaattactaatgatttcatatttttttctttcacctcttactctttggagcctgtttcctaatggctccggggttcaactattatagcatgaaaaaagcacttcgtccagaaaagggccgaagcctttttcgtcgaaatgctctttactttcatattactctcagcagctgttcatgcacattttccgctgatcttatagcccactccacgaactgtttccaccagatctcctgccgggccaagcttctggcgaagggtacggatatgtacatctacggttctgctctccccgtcgaattcatatccccagatctgatttaaaagctgtgttctggaaagaaccgtaccactgtttttcagaaggagacaaagcatctcgtattctttcagtgtcagattcacaggctcctgatcaacagttacctcatgtcttcccggacatacataaagattttccatacgatactcctctgcgccattgtcctctgctctccgaagaagggcacgtaccctggagatcagttccatcatacggaacggcttcggaatgtaatcatctgcaccgctgtccagacctaccacggtatcaaactcacttccttttgcagtaagcatgatcaccggaagtttccgcacatccggacggatacggattttttttaaaatagacagtccgtcttcctccggaagcataatgtccagaagcaccagtgaaggcagttctttttccagcgctttccagaaaagtgatggccgttcaaaaccctgtgcctccagaccctgactgtttaatgtatatacaacaagttcacggatactttcatcatcttccacaagatatatcataattttcctccagcttcatttttcatctgatacgtgcaagtataaagtgcattcgtaaaatccaacatagaaaaaaggttaagtttatgtaaaatatagaaatccttaagaaattttaatttgtaaaagccgaacgtcaatgttatgataaagcagagagttgtttggaggttttttattatgtattcttttattgtgaatcccaattcaagatccggtgagggacgtaatgtctggaaccggcttcgcagcatcatggaaagtcaggggatctcatatcagtattttctcacagaatatgtgggacacgccacagtactggcacagaggatcagtgccgccggaacaccggaggatccggtaactctggtaacagtaggcggtgacggcactatttacgaagtacttaccgggatcattgatctgtcttcggttgttttcggatttatcccggtcgggtccggcaacgatttctgccgcagtatgggcctgccctttgatccttttgaagcgcttcgctctatccttgaaaacagacggaccattttcatggatgttcctgttctccaccttggcagccattcctaccgtttcggcatcagtgcaggaatgggctacgatgcggcaatctgtcaggaagtcctgatcacacctggcaaaaaatttctcaaccgtctccatatgggtaaactcatctaccttatggtggcactgaagcaatttctcttccttactccgtccccggtcacgataacacttgacgggaacaagccacaaaccttcagcaggacttggtttgcggctgtaatgaaccagaaatatgaaggcggaggctttaaattctgtccaaacgccagtccggaggatggtttactggatgtgatcgttattgaaggaatctccaagctgaaaatgctgttctgcctgccgagcgctctctggggaaaacatacccgcattcgcggtgtacatattttacagtgcaggaacgtacatattacaagtgcccattcccttcctgtgcataaagacggagaatccggcggaatccagcgtgaattttctgtgaccattgaaaagaaacctttaaaaatcataatgcctgtgttatagtagcaggtagatacttaacaaaaaagaagcttaaggctgacatcagccatacctcaagaaaaggagcggcaaaatgttgagtaaaataaaaaaatacaggcacggttttatcatagcgatctatttcgttgcctatcttatcctgtttggatatctggagcagcgacctgtacgagcctaccatgttgtacatactgtttttgatgatatgatcccgttctgcgagatttttattattccgtaccttttatggtttccatatgtggtaataacggttgtgtatttcctgtttcgcaataagaataaaaaggaatatttccagctgatcttcaacctgatgatgggaatgacggttttccttgttgtttcctacatctatccgaacgttcagtatctccgccctgcggtattccccagaagcaacatctttacacgactggtggccgagctctatcggacagatactcccaccaacatcctgccaagtatccatgtatttaattccctggctgtttattttgccattcatcactgccaggcactgaaagacaggaaatggcttcagcgaggagccctgatcctttctgttctgatcatcctgtccaccatgtttatcaagcagcactccgtgatcgatgtatgtcttggtaccacactggcactgttcggacatctcctgttctatccacagagagtggaggattacgaggaacagcgctccctatctcatatgcgcaagaagaaaccggaacagaatttataaaaaaagccccgttgggggcttttttttaattaaatccataaaacttctgacagatcttataggctgccacaaacatctttcttccacctcttccgggaagattggacacccttccgaagagacttctccgaagcttccggtacagtcccatattctgatctttgatgtaatcctgcagctcctgttttttatccaggcattcctgcgttgcagctcttaccagcatgatcgaagaaacggttgtgatgatatccagatagctgaacatataagcacgaagtctgcggttgctcacattagccttcagataggcgtccaccatcagtttgtttacacggatctgctgatcgatacgcttgatcatcactttctcattgacagactgatcatctcttccaataaaatatcgatagaaatttacatccagataatagagattttttacatagggaagcggctcaaacgcaaacaggttatctacgtagaacgtatgcttcggaagctccattccacagtcatggagaagttttgtacggtatatcatggaatgcataaggagatactggccttttttcatgtggcgtacctcatcccatccgaaaatctggtttgtcggaaaacagtgtctgtactgcatgacctttttgcgggtagctccctgcttctcataaacgaaattactgatgagaagatccacggtctcagccccacgtatcagttcataaagtgttttcaggacctcatagtaggcatcctgatttacccagtcatcactgtccacaaccttgaaataaagtcctgttgcgtttttgatccctgtgttgactgcctgtccatggccgccattttcctgatgtatggcttttacgatagttggatatttctcggcataatcatctgcgatctcggcagtacggtcactggagccatcatctacaatgatgatctctacttcctctcctccgatcagcagggaattgatgcattttgacatataagcctctgaattatagcatggtattgctacgctcaaaagtttcatgtgttttcctccttcatatatctggtgtatgcgcgaaacgcagatggtattgcatattttttatcggattctctcttatccacaaacaggaactccccctgcggtgcttcttccagagaggatacagcgatacgataagcacacatcctccattcaatatgggaaaaaatgtgcttcgcatccggcagtgcttcgatccgcagtggttccagccccatggcttttacccgggcaagtgccgccttctccgtcagatgtccttccacatttggaagctcataaaggcctgccagaagtcctgtatccggacgtttacggatcgctgtgcctgctccgtcctggatcacaaggaccgttcgctgttctatggtgcgggctttcttcggtgcttttacgggaagttcttctacagttccatgctttctggcaaggcaaaaatgccccaacgggcattcttcgcactttgctgctccgtttggaacacagactacagctcccagctccatcatagcctggttgaaatcccctggtctgtcctcagacatctgctctgtaagatcattttccaccgatttccgtacagactgtttcatgatatctccacggttttcggtgagtcttgcgtatacccgcaacacatttccatctactgcagggactttctttccgtaggcaatggacgcaatggcacctgccgtatatcttcctattccttttaacgagagaagtgtctcaaaatcctcagggatcctgcctccatattcttccatgacctgaacagccgctttctgcatgttgcggacacggctgtaatagccaaggccttcccacagcttgatgatcctctcttccggtgccgccgcaagggctgctacatccggaagttcctggataaagcgctgaaaataaggtttcaccgcttccactcgggtctgctggagcatgatctcagatacccaggtataataggcattgtctttatctctccagggcaggatccttttgtttttatcgtaccatttcagaaggggttctgcaatgttttcaggcatatcgtttcctttctataatcttaccggtatcggatcacatatcttcatggaatcttccgtgacaacacagtcataggccaggatgtgaacaccggcatctgctgccgccttaagtgtttctccaaattccggatgtgtctcccgatttggttcaaaataccttacacccttcatctggatcaccaaaagaagatacgcctcatagccgtcagctgctgcatgcatcagctcacaaagatgcttgatcccccgttctgtaggtgcgtccggaaaacgcacgatattattttcttccagagtgacgccttttacctcgataaaagcctttcgcttcccggattccacatacaggtcaaaacgggaatttccgtatgtcttttctctcctgacagtcactttctccggaaaaagatttccggccgccacccactcttctgctgctttatttggggcctgggaatccatattgatccagcggccctccttgttcacactgatcagatcgtatttcgttttcctggcaggattatcactcttttccaggatcacttctgcttccggaacaagaagttcccggcatctgcctgtattcttcacatggaccgtttccagctgatccccgatctgcacatgagcgataaaacggttaggcctgtctttgaatatacctctgatcgtattcttataattcatagtttttccctcgtaacccttactataacataaaatcttcaaaagcgcagttgcttttttttcttttctcatatagaattgttttgataactgttcactggtaatattctgcgaggtgttttttgtgagcgaaggccacagaaaacccgagacataccgcgcgaatttatgcgattaacataaattctgtgcatcgtgaagcgtattgctgagaacggagtgaacagtaacttgttttgtactatgtccagtacaaagggttgctttttttacatatcatagttttttggggaggtttttctgatggacagtattatttttgatgttgacggtacgctctgggattccaccggaatcgtagctgaggcctggagtgattaccttatccatacggagcacatggataccgacgtaagcgccaaacgactgatggggcttttcggccagctgctgccggatatcgcaaaggctcttttccctgagcttccggaagcagaacagcttcgtatcatcgacggctgctgccaggcagagcacgaggcactgcttcgcaaatgtgctccgctgtatccggatcttgaggaaacactgaagattctttccagccgttttcctctttttatcgtcagtaactgccaggccggatatattgaagtgttcctgaaatccacaggcttcggacactatttcaagggccatctctgtccaggtgacaccggcatggccaaagcggaaaatatcatgaagatccgcgaggataataatctttccgatccggtttatatcggtgatactataggagactttaatgcctgccagaaagcaggagttccttttatctttgctgaatacggtttcggtcaggtggataaaccggattaccggatcaccaggccttttgaccttacggagatatgcagatgagtatgaaaaaatcaaaatccatagaccttacttccggtccgatcctgaaaacgctttcagagcttgctcttcctatcatggcatcttcccttcttggaactgcctataatatcacagatatggcctggatcggacttctgggctccaaggcagttgccggtgtcggtgtgggcggcatgtatgtgtggctttcccagggacttgtagcccttccgagaatgggcggacaggtaaacaccgcacagtcctgcggccggaaggattataaagaggcacgttcctacgcggccagtgccctgcagatgaccattctcttcgggctcttatttgctgcagcaagtattatatttcttgatcctctgatcggattttttaatctgacagacccggaagcatattcttctgccagatcttatatgctgatcacctgcggactgatcattttttccttcctgaacctgactctcaccggactttttacagcccagggagattccaggtctccactgatggccaattttcttggacttgtgggaaatatgctcctggatccgctcctaatccttggcattggaccttttccacggcttgaaacggcaggtgctgccattgccacagtaactgcacagtttctggtttttgcagtgctggttttccggatctttacttccgggctggaaacaaatgtacttcgtgaacttcatcttttttcacgttttccgagaaaattttataaaaatatcttccgcattggttttccaaccgctatccagagcatgctctactgtatgatctccatggtactgaccagaatggtttccgccttcggtgctgctgccattgctgtccagcgtgtgggcggacagattgaatccgtttcctggaacaccgcggacggctttgcctctgccttaaatgcttttaccgcacagaatttcggtgcaaaaaaatacgaccgcatccgccagggctaccgtatttcctttggtatcctgacaatctggggccttatcataactgcagcctttgtgctgctcccacgcccgatctccggactgtttttccatgatccggaatcccttgggatttctgtaaattacctgatcatcatcggcttctgtgaggctttcatggccattgagctgatgaccatcggtgcactgtccggccttggtatgaccaagctctgcagtatcatcagtattatcctgacaggggccagaatcccgcttgccatgctgctgactcatgcgggaatgggactcaatggtatctggtgggcactttcccttacttctatcgtaaagggaatcatctttactctgacattccggcagaccagccgaacgaaattaaactaaatacagacagaaaaactccccgcggataccggagcctgatcagacaggttaccgtttcacggggagttctgcttttttacctaaaggatagttctgatacttctgatcattttttgatacattttgttctgagtacaaacagaaataccgcaagtatcacaaacagaattactacataggcaatctttgctgctacacttgtggtgaatgcgtcaactcctgtagccactccgataagtatcagacagattcctgaaaccttttccatttttttctcatcatacttctgggctctggcctgtgtgtttccgcctttcataaaaaaggaaccgtgtccggtaaaaagcataaatcctactaccagtgctgcgattgtaggtataaagctgaatgactgatcaaacataatgttttcctcctgctaaagaacaggagccacacaccggatcaccggctggctcctgtttgttttttgactacagctccgatcaatagaaacagacgatcggaacattatactggataatgttgtaaagctctcccgctttatccggcggcatattgatacagccgtgggaacctccggttagataccgatcgcctccaaaatacggctgccagtctgcatcatggaatccaatgcctccgttaaacggcatccagtaggttaccggctgttcataggaataggttccgtctggtttcttggtgccacgtaacacatccgggctcttcttatagtacaaggtgaagattccaggaggtgtttttctcttgggatcacttgcaagtccggatacgatatctgattcaaagatcacatttccatcctgataataccacatatactgttctgtaaggtccacttcaatgtaggtatttcccagatcattcacaccataagaattggctctcatggaataaaccggctctctggtcgtctgagctccggactggatctcctgggtaagctgtgccacctctccgtcctgatcgatcttccagccatatgcagaaccggaaaccgaaacagttcttccgcttgttgtctggaactgacgctctgtacctactgtatcatgatccgctgcaagctgtgccacataatccacgatatgctgtttgaaggatgcatcatcctggatcagctggcccttttcgtcaaactgcagccagttcttgatggtgcttccatcaagtgttactgtctcatctccaaatgtgtaggtgatgcttgccctcgcaaagttattatatgcatccaccgttgcctgcagatctgcactgtcgctggtcacatctgctttcacataagcatccgggttactgccaagatctacttccccgtcatcgctgctgatagcatcactgatcatctgataggcttcttttaccttcagttcacttcccactgtctccggcacgatcgtaaactcggaatcattaaagcttacgtacgcattctccggtgctacctgattctctttctgggcacagttcagtgctttcacttctgactccagctttgacttgtcaaaagctgtctgctcactggctgtgtaagtcgtcttttcaaaaaatcctctcacccattcatagggcttctgcgctttcaaaagcttcagaacttcaccactggatatataacgataactgatatccgttccttctatagtctgcggttcctgatctctggcctttacctggatggaatagccttccattttttttgcgatctcctgctcaacctcatatgcagtcctgttggagctgtcgatcccgttaatcgttgtgccctcaaagaaatgactggtgtaataataagatactcctgcatatgcacagcctgccactaccaaaaccatggcggcgatcattccggtcaccttcagtgccttatgctttttcttttcgggtataacgataggttcaaattcagattcatcgataggtacgtaggtgatcttccttggccttgctgatttcgaaggtcttgccgacttgtgagcagctgatctgttatttttattttcaggctgaggctctcctgcagtatcactgacgatttttgccatggcatcattgatcctgtcctcgatatccctcttttcatcgttgctcatatttattcacctctatgttcatgtgccttcaaaaaaggcatctttccattgatactttctggtcttactcaccagctttttcattatatcatactttccggaaattgcatctcatttcacggtttttttataacttatttgtaccgtacagcttccgcgccatatctttcataacatagacgtacattacccaaaggagcactgacgcaaagatccaggccaccggacttgcaagacaggtaccgatatagctactttttccggctgcaatggtagcggtgatccctcttcctgcaagctcagctacaccggccatcataggaagaagaccatatcccattccctggatcccgtttcgcagtacattgacaaaatacagaggaataaaaaacagtgccacacattttacatagattgctaccataggaagcacttcttcaatgttatctgagataaacagatatgcgaaatattttcccgcaaagaacagaaaactgccaacaacaacagaatatacaattcctataaaatgcgaagcccggaagccttcccgcactctctcaagctttccggctccgatattctgtgcattgtaggtagcgctggcagttccctgtgccacatatgcctgggtgaagatctgctcgatcttacttcctgctgtaaacgccgccaccgcataagagccaagcatatttaaggctgactgtaccatcatggttccgatcgccgtaatggaatactgcagtcccattgggattcccacaccgatctgcttggctgcgaggttacgtctaaaataccagtcttcttttttcatacggagctccggcacaaacttccagatatataccagacataagactcctgaaactccctgggaaataatggtagcccaggctgctccaggtgctcccagcttaaacacgatgataaatacaaggtcaagcacaatattcagcattgcagataagatcagaaaatacagtggtaccttactgtttcccagtgcacggaggatactggccaggatattatataatgcctgggcaaaaatccctccgcagatgatcataacgtaagcatatgcatccttgaaaatatcatccggcgtatgcataaatttcagaagtgcatgcatacctgtcatgctgactgctgtcatcactgccgagaccagcgctgtcaggatcagtgcatttcccacggtctgacgcatctcatccatttttcccgcaccgtacttctgtgcagtcagtacggtaaaaccggcagtaagtcccagaagaaagcctatgatcaaaaagatgatagttcctgttgagccaactgccgccagtgcctttgttcctacaaattttcctacaaccaccgcatctaccatattgtagaactgctgaaatacattaccaataaataccgggatcgtaaatcccaggagcacttttaccggttttccctgtgtcatgtctgttttcatgaaatcttttttccccccatttaatttgatcgttcctaaactttgtgctgctttttgttattctttttattattctttctgtaactttacagttgctcaaaagttacctgtttttatgtatcagagggattatagttgaaatggaatgattttacaagatgattttgaaaatttttttcatgtgtggaaacagaaacaatcggatgaaaaaatcccggcagatccgtaaaaatctgccgggattccgtgaagcttatttatttctcaacaagaagagactctcctgtcatttccttcggctgctccatacccataagctggatcagagtcggaacgatatctgcaagacatccgttctcacgaagtgtgtatttcggatctgcgtttacaaggataaacggtaccgggttagttgtatgagctgtccatggctcacctgtttcataatttacaagctgctctgcgttaccatggtcagcgcagataaagagctgtccgtcaacctctttgattgcctctacagccttaccaacacacgcatcaacagtctcaacagccttgatcgcagctgcctcaacacctgtatggccaaccatatccgggttcgcaaagttgatgatgatcacatcatatttgtcagatttgatcgcctctacaagcttctcgcaaacctccggtgcactcatctccggctgcatatcgtaggtcggaaccttcggggattttacaaggattctgtcctctcctttgtttggttcctcaacaccaccgttgaagaagaatgtaacatgtgcatatttctctgtctcggcgatacgtgcctgtgtcatatcgtgagctgcaaggtactcaccgaaggtattgtgaagaagaaccttgtggaatgctaccagcttgttctggatggtatcatcatactctgtgaagcatacgaatgtggtatccagtctctttgctctctcaaagcccttaaaatcgtcatcacagaaagctcttgtgatctctcttgcacggtccggacggaagttgaagaatacaacggaatccttatcggaaatagttgcaaccggtttgccgtccttctcgataacagtcggaagcacaaattcatctgtcttgtcatcatcataggaagcctgaactgctgctgcagcatctgttccctttacgccttcgccctgtgtaagagctttatatgcaagctcaacacgatcccagcggttatcacgatccattgcataataacgtccggagatcacaccgatctcaccaacgccgatctctttcattttagcttccagctgctctacaaactctttaccggatgcaggcggtgtgtcacgtccatccaggaagcagtgtacgtaaactttcttgagtccctctctctttgccatctcaagaagtccgtagagatgtgtattgtggctgtgtacgccaccgtcagaaagaagtcccataaaatgaatcgcggaatcgttgtcttttgcattcttcatagcagaaagaagtgcctcattcttgaagaaatcgccgtcctggatctcttttgtgatccttgtaagctcctggtatacgatacggcctgcgcccatgttcatatgaccaacctcggagttacccatctgtccgtccggaagacctaccgcaagaccgctggcattgccttttacaaacggataatctttcatgagtccgtccataaccggtgtttttgcctcatatacagcatttccgtcatgtctgtcattgagtccgtatccatcaaggatcattaaaactgttggttttttgctcataattttccccttcttatctttgatcgaaaatctgtccggcacagctcttcactgattctgaaaccctctgtaccattcaggattcttttgttttccattttatatagtaccaaaatccagaaattttgcaacgttttctttgacaaaaatttgtctgttttcaatttcccgacaactgatacggctgatctgtaaatttacgcgaaagatattatttctggtatacacggatcatagaagaaatctttcttacagatgcgctgttttccagttcttccttaaccttaaagaaagcgccctcgcttacaagtttggtgatcacaacaacctctgcggtatccggtctcttgctttctttctgcatgatctgtgccacgcttgcctgatattttgcaaaatgctccaggatttcagccagcacaccgcagcggtcctctacctgcaggcggaggaaataacggttatgggtatctgccatattttttaccggaagtgtcttatagcaggtgcagcctactcttccgcagcaatctgccttcatattacggactacctcaaatacatcaccggcaaccgcacttgctgtaggaagctcacctgctccacgtccgtagaacatggtatctcctactgcatctccgtgtacaaaaaccgcattataagaatcattgacggatgcaaggggatgctctgccgggatcagcatcgggcagacataggcctcaacgccgtcctcctgacagcgtgcaacacccagaagcttgatctcgcagcccatttcttttgcgtaacggatatcctttgccgtgatctttgtgattccttctatatgaacattatcaagggtaactctggaattaaaggcaactgatgcaaggatggcaacctttcttccagcatcaattccctcgatatctgcagtaggatctgcctctgcatatccaagttctgtagcaagagcaagagcatctgaaaattccattccctcctgggacatcttggtaaggataaagttcgtagttccgtttacgattcccataacttccgttacatggttggcctcaagactgttcttcaacgggctgatgatcgggattcctccggcaactgctgcctcaaacagaaaatccttctgcgctgccctggcagtttccaggatctcttttccgtggactgcgatcagatccttgtttgcagttacaacgttcttgccggctttcagtgctgcaaggatatacgcacgtgccggctcgatcccgccgatcagctcgatcacaatatcaatggaaggatctccctcaatatctgcccagtctgttgtaagaacagaaggatcgtctaccttcccggacgctttctcaaggttacgcaccaggatctttgtgatctttacctggcatccaagcttggctgtcatttcctgctcctggcttttgatcactttatatacaccggttcctactgttccgagaccaagaagggccgcatttacgactttttcgttcattttctgatgtcccctttccgttttttccaatttttatcagagtaactcctatgttatggcagaaaacgctttttgtcaagttccggcagaggaagcaattccagccagctgccaaaaagtccggtgatcagttcctgcaccatagcttttgactgtggttccagtttatccagctggcgcaccatggcagccagacttttcagaccaccttcctggatttgggaaatggtatctgctccggttgcttccaacacagaaaagagttccccgatgagatgctctctctgctttttatccatatggtcgatccatttatgaagacttcgatctgacgccgcagctcttcttgtcaaactttctttctctataaaggatgaccccattacctcccaggtaaaagcatcatgctgcaggattcccttctgtgtactggctacgatccgcggatctttctgatggctgagcagcataccgatcacagatgcctcgggaatgatacgggtgacttttggcaaaacgctttccactcttccgggactgaaaaatccttctggaaaacccgggccatcattatcatagacagaaagaagcttttcctgcaggatgtcactgcactgcatcgctgcatacatagccagatttcctcctttggaatgaccgccgatccgcagcatggactgtatataagttccatgcgtttccagatattccaacgcttttctgtgcgaaggaacaactccgttgcttaagttaaaatcctccttccatcccacaatggtatcatcggttccacgaaatgaaatatatgtggttccatcatccagtcctatagtcactgccgcaaactgctgagcctgactggaaatgatttcattgacaaagccccctactgtacatttccggaatctctccgcacaggccattttttcaaggagcaccggtgtattctgcagaaatgcactttctgctttcagatccttcttcatttcctgtctggaaaaagccgcaaagagttcttctacagaaagagtatttccgttttttacttctgccatctcatccagatcaagataggaaaaacacgccaatatcagattgtcaacttcattaaagggtgactgctcaaaggtaagatctcctctccagtcaagataatccagaatattccccataaaatcctccgcaaatgatcatataagcgtcttacgcacagctgcaggctttctttctattataatacgtaacggctgcatcacagcacagccatctgatgcgtttctgccgttatcagataaccattttctgaaacgacataccctgccagatatttattgttatcataccataaatcctgatcatttgctcctttcatccattttttttctgagataaaggatgtaatgaatgcagccgcaggtaaaagtcggaaacagtatcgacaggcctgctgctgacatcatatagatcactgccccttttccgtcatccggtgttcctgccacaaagcagtagaacatggtagctgaaaaatacagtgtgatcaccactgaaattaagattttaaaaaacttcctcattgcttctcctttctgtagtgtcgatataaggacactgttgtgattccaattttaccttcataataagattaattcaaggatgaatcggacaggatatatatatgataaaatatgacagattttgggtcacgatgaaggagcgtgggatcactcagtatgatctttatgaacattaccagatcacccgttcacttctggacagacttcgaaaaaataaaaatgttgaaatttataccatagacaggctgtgttccattctccactgcgagatcgaggacattgtggaacatgttcccgagcctgacgaaaggaacgaacatacagaaaaagcttcagagaaaaacaatccttactctgaagataagaaaaactctctctgactgtgatcagatgcagcttttttgttggctgtgctatccgtgtcagggagagtttttctggtttttttataaaaagatataaaaaaaggggccgaagcccctttttaagtgaatcttatttgtagttcacaactatacataagtcgttcattttatccagtaatctaggcgtttttagctccctctgtcgcaaaagtgatatttaaaagtgatatttgaaatatctctaaacattatataaatacctctttccctgccatatctttgataaaagcatcatgtgactgctttgaagcataatattcttttccaatcttgctcccgtaacccatattaaacatcactttcaatattttaagggctttgttgctctcacagtgatatatctgcataatatcacttttaccaagcatggcactattattcagttttatgttatcaataatttgcttgaagatgttatcctgagattgacatctttctatcaagctctctttcgacattgtagcataattactttcgcacttcaatccttttactttatcaattaaattttcttccatgttttaataacctttccaaaaaaggtataaaaaatacaaccgtcaaaaaggagttttctaaagttgtgttccacaccttttttttataggttgttatgtaatattacattgcgttttgaattctttcgctttatttgccctcattttatcgcattttccaaatttgtcaagagatgccggaaaccaattttcaataagtaatattcaaaaaagacgcaccaattggcacgccctcaatttatttgaaattattcagttttttgattcaagccgaattacaaatgtggctgtacccgtataatgacctgccgaaactgcatcaaatgaactatacattggtgtatttgattgcatctgccccgtctcaaaattagctaccgcaccattatcagcaccatataagtataatgtgcctggatcaccagcttcattgtgcatcgaaatagttttttcatttgcatatacacatactctttctgatgatgtaatattcatcaaactagctgtaaaataatatcctgtgctgtcatccaaataaatactttctggaatatttatacaaaatgagcttttattgtcatgttctacctgaacatctacgctctgtccgtcaactcttacttctgttgcagatacaggcataacagaaccaatcaacaagacacaagccatcatcattcctattaacttctttctcattcctccaccaccttcaaatcaaattctactcttgcattatttaacgctgtaccttcatccctaaaacattcaatcagcaaagctccgctataatcgccagttttcaaagtatcatcaagtgtaatatcataataccctttgcccggatcaacatagccagattgccaatattgttcgttatccacatataaagtcatgcgaaaaaggcaatcattttcttcaggattataaaaattcaccttctgttctttttggttggcaataaaggtaagtgaaccgataccgggaatcttaatcgttttatcatctgtctttaccccagttggtaatttttgctcaccatcccactctacagcaattccgtcagttggcagcagactcttattatcagaccgaccaaaaagaaaaaatataataagaccgcacaacaagagcaacactacaactatacaaatctttcgcttcttcatgtcgttcctcctgtcattagtctatcaatttttcaatcaaatctatatgcaaagtgggtgcatttataactttttccaacggtataaagtggcattatcggcagcagaacatttgtttgtatcgtttcgcacaccatctatcacattcttatcataatgcttatatggctttataaaatctggcacaaccatatgcaatttattacatgccggacaatacaccctttttaatatgtaacgattgcgcacaccttcattatttatgatatatctgcccttgcttccacgcttaattactttgccaccacaactacattgtatcggctcatccggctcaacaacaaaactgtctttcttcttatataaatggtagttttttatttgaatcatgttcgagttgtataattggggtttgagagtgagatagacctcgaagcagattagaaacgaatgaaaacgcttcaaaaatgtaaacatagcccccacccttcaaaaataattttctacaaaattttttccaggcaaaaaaagaaccctgtgtttccacaaggctctccccggattattccccagattcctttcttttctttgctctaatcaatgtacttttgcttattcctgttagcttaacaacctgggcatatgaatgtgtttcaagcaaattcaaagcgttttcaatctgcatagcatcaaatttttctggtcttccttcaatgaatctttcgccctttgcctgtgcatttgcctttgcaactgcctttccttcttgtgttctgtcaacgatcatatctctttcaaattctgcgaaagctaagaagatattgcggatcagcttacccgatggcgtattatttaattctcccatgtttaggatatgaacagatacaccctttgacagtagatcatctatcatttccatgccttgaatggctgaccttgctattcggtctaacttagtaactactatcttatctccctttttaactactgctaacagtttacttaattcaggtctttctttctttgttcctgtgaatgcatctttatatatctgtgttgctccggcagcagtcaacgctttctcttgtgcttctaagctgttaccgtcctttgcttgtccctttgtgcttactctcgcataaccataaatcattgtgatcctcctttacttatgacaccatgttttgaaacttttatttatgacactaagttttgatactatcttatgtacttatgataccatgttatgaaaccagtgtcaatacttttaagttttgaaccatatatatttataaccgctgttgctcaaccgcctgttatctctatcctattaaagagaacagaagcaagcgcaagaacaacacaagaatgtacagcatgaattgttacaagattttcttttgactatgcaaacataaataacaaattttttcattttgtctcttttattcgagatgtttttattgactatctcctttattcgagatataatactatcaacaaatgaagggagaaaagcaaatgcaaacagaaaccatagtctttgcaacagaaaccaaaaatggaattgtaaccagaatgggaaaatcatttatcactcaaccgcctatcaagttcaccggtggatctatcaaatggtttgatgataccaagctaataaggaggtcagacaaatgaaatacattatcttctataataacggaaacactcataattatgccaacagcagaaatgacctattaaaatggttggagcttttaaaaagcgaaactatcacagacattagaaaaatttataaatctggtgtttctgattcggttttagaaaaatacattaaatactagggggaaataatcatgattaaatttacaaccaacagaaaaaaaatggaattttggcttactgttactcaggtcatcaatatggtcaagagctgggacaacctcattacagacggaacagatacaggcatatttattactcctactgttattctttggattgatccattgcatgaaaccgtggacgtggaagaaacaattgtcaatacaaacaacgaaatggaaacagtaacactagaaatcgaacacatgtcactggaagaagtaaacgatcttcttgggtgggaacaatcattatatgaatattgcaagaaatgtaaatattaaataggtggcagcagtacgctgttgcctatttttttaacaaacaaaaataaatgttgtgcgttattttaaacaatgatatactgaatatatcgaaaaaaggagatacgcacatgattgattatagtgaaattatccggcgctttgccgataaagatataaaacaatatactgttaagcagttacgaattctttctgcttcaacaatgaaaaaaataaccgaaaataatggtgattacattaacataccaactattgaagaaatctgccaattactacaatgtcagccctgggaactattaaaagactggaaaattgatcttgatccgaacaaatcaatagaagctctgagagaagcacataaacaagccaaaataaatggaaaggaagcataacgcttccttttttatatattgtgcaaaaaattcgcataattcaactgaaaatcaattactttcccactttattgccaagtttcatatacgttttttatgtcgaacttttgttcttttatcgtactatatattgttctatatgttcttagggttcgattcacaaaaaataactgtaaaatgagaaattgatagaatattttttatatataaagcaaaatcacctagcaaaaactaggtgattctggaataattaatgatattcactgccgaagcagtggaagaattaatgtttatttctttcatcttcattatacatatatattatatgcatgtcaagcaaaaacatgttattgttgtggcttatttttcattgaatatagccatttaacttgtttatcaattgcttcccaatcttttttagtaattgaaactattttgcccccaaccctaaaaggcttgtcaatgcgtgcgatatcaataattctcatttgttcacacagcactgtagaattttgtttttccaaatcaatatgataccaatatccatcatttaatctctgtgttgtcattggcaaaactgtacaaattggtgaatttttataagttcttattactaatactggtctatgctttccttcttctgatcctacattgcatcccataaatgcccaatacacacaattataaacaattgggaaatttttacttcctgagttaaattttaacgctgctttctgttttgtccaatctaaataatcctcaacatcattataatcaatcattcgttcttttacctctttcgtatttttataattatacctcataatagaaaaatttcatagatgtatttttatgaaagcgtaaaaaaatgagaacaactgcatttaacacttgctctcacaacttgaaatgaatgaaataatggttttataaccatgttttgaaattgtctgttaaagaaatttcacaatgatcgggctttattcggcagcccttaacctattcgccaggaacacacctgggctaaatttagccactctgttgctgtcccagtgctttctttctaacgtgttcggatctgttcccaaacgggcttttgtcctatacgtttcaaatctgccaaacttttctatagtcaatgaatcctcattgagaagaatgtctgcaagttcattgaaaactgccctaacatagttcgctgcgacataattcgggcagccacattttttcgcaactcttttataaaactcctgtcattgattcagcatatttttcttgatttgctaatgttggtgaatccgttaagtttgtcgcatcctcaacacgctgttcgtacttatcccaggacttcatcaagctcttgatgatgtttgtttgtcgtataccggcaacttcaaaactgatattcgacttttcagtgtcactaatagaatcccacttatcggataaatcgccaagaattgaatccaaatcacggaattctcccgaactgcttcttacttcgacacctacagctcgaagactagcttctgcattggatatatcacttgccaatgttccagacgtttcgcttgcttttgtgattcgtgtgaagattgtttttaaggcattacctacctgtgaaccgcccaatcctgtttgttcgatgattgttcccaacattgacgaatactgttgaagactcaatccagcatcttttgcaaccgaaccagaagttgagataccgcttgcgatctggtcaataccggcagaaaaatcataagccatactctgtgatacactttgtagcgtatcagaaattgaaagcagatcatcttgcgtcaaatcaaactgattcatgattgattgcagtgttttagccgatttctcgccacccgtgccggtaacgtttgaaagcattgtggcggtttgtgtcttcgccaatatactttcaatggactcattcgcatttgcgtacagtgccgatgcttctaatgggatatctttgtcattatcaacaaattcggcacacaacggcataccttttatagtatctgcattgtctcttgtgtattgttcgaaccatgtaatcccgttttcattccattttgaaatgttcggataaatttcatgcagtacaattttaacttttcttctgccagagatattctggtttatttcaagtatattcattttttcgctcctttactgcgctaactgacctttagacattggtaaagtcatattttgcagtctgtctttaatttttttactcgcaaaaaatcggcaatgtggtgccggtggcatgtattccggcttttttgtaaccttgtttgttctggcatagccttttcttaaataaattcgccaacttccaagtccctggatcttaacctctcgttcgtttacaatcgcatcgcctatgatttcaataaatacatcagtgatatatcttgcttttgcgtaagtacagtcaagttcttttgatagcttcaggaactgtttaactttgcttagattctttgtgctaatgttaatctttccatttagccagtctctcagtgtcgaattcgggattctggtagctcggctcatatacgatactgtcaatccgttgtaaagcaaataagcgtttgttatttctcttatatttagtgtttcatccatgttattctcccatattttgtgtttttttattttaaattttgtcaaaaaattgcgtcaaaaaaaattaacacatatgtagacagacgattgctcatctgcctaaatatatattaaaagtaataaaaaaaaaaaatgataaaaagcgaataaccattttaataaaggggagcttatcgctcccactcttagggacattaaaaaatgtctccacatatacgattgtctaaacacataaatgctaaatcaaacacataaatccccttatgcgtttgagtcaacatttaatgagaggcacagcgatacatgtacctctccgttgtttctgcatcgttgccttgatgcattaggtgaataaaagagcagaagcgtcaatcccatctttccccttattcataatagggtgcaaaaatttttctgattctttcatcgtctgtaatccgctcctattgctgatttccgacgatttttttcaaaaaatataagtaaattaaccaataattttcaagccgttttttcgtttgctttctcgttttttcctttatttacttggtttatcggcattttaactcaaaaattaaaaatggctcaaatccaaaagaaaaaaggactgaaaatcagtccttcaaacctcgatatttcgcatttctttctctttttaacatcttcttatgttcctctgcgcatttatcacaccttacttttcgcctattgttaggcatcctgataaatgtctttccgcagtccaggcatttgcaattcctcggctcggcttttttatatcctcggcaatcagaacacaatctttgattattttgcttgttctgccggaacaactgaccgcacttttcgcacgttccaatgttttcgccattgatccggtcaaagtgtaagtccatgtgatcgtagtcggtcactgtttcaataacttccccggcatcctccgcaaataaaacatatatttgatttcgcccggataactttatatatccgttatcacgtaaccaatcacggtaatttgtccgactggcagcagaatcccgatgcaacttaacttttgccaacttacgaattttcgcatcttccatatctacccggtagtctgtcgtgtatgacagatcatatctttttatcagtatatgaaagtatttagcaacgaccaacataacaaaaagtagtcgttgaatttcttcattgtcgatttgtttaattgtgcgccattcattcaaagtaatcgggatcggaaatctgtcttgtattcttttctgactggctgtttcaaccgcattattaaacggaatcatatattcctggtaaaatggatcaaattgaattctaccttctcgtctgcaatcactgcaaaaatctaagagtctattttcaagttcatctttgtcctgttctccattccctagatatttgcatattagtgttaaatccttttcgccatactcaaagttatgactttcacatttttcttttgcttctcttccttcgttccacttaatcatttttcgtactcctttttccatatatcttgaagtacgtcttgtcctatgtttgctttaaacatcagccacaaaaccataatacaggagaagcccggagatgaagagtctcacgggcttatacttattggacgaaccgcaagcggtcggtctataaacgaaaatgattttgtgaaactaattgtttcagcatggtaatcatatcatgttttccaaatttgtcaatgctttttgacagataattttaaattattttcttttattttcacacaacttataatatctattcttcaaatttttctttcaactttaagtacatctcatacagctctttttccttttcttccaggctcttactatcacttttttcagaactatcacttttcttatattcatcgagtacagcctgagaaggtgtgcgcacgctgctaagtgcttcatcagtcgcatgagtgtatacattctcaacactgatagccgtgtgtcccatcataagagctgtatttactacatttgcgcctttcgctgtgttcgccatcgtatcggctgtatgtcgtaaagaatgcaagcataagcctttcatgttgcctctctctgtcaaatgcacatcacgatcaatgtctaatttattgcacagctctttaaagcatacttccatgctacttgtggatcttctgcgaccgtttctgaatgttggatataacagattgtctttattacatgtacaatttagtttagtctgctccatcatgtaaagaacacactcacggcacagttcagacatgactatgtatcttgcttttttgttttttggcactttcgtataatattcaatacctttatccttatcgttatccttaaatcgtatagctcttgtctctacaatatgaatacgattattctctaaatctatattgtcatttcttaaagcggcgaattcactggcacgcataccagtttcaaggagaaacaaaacgacaactggatattgtcccatgttgtttttataagcatagtaaaatttttgaatatcttctggtgtgaatacttctttcctattcttgatatcttcttctcttttttggttgtactcatcggatatttcccgtttaagttctgcttgctctgcataattttcctttaataaactctggtttacaagccatttgcaacatctccggcatagctgaaccgggaaagaacatgtttttctacttttcagcgaaagaatttcatcaaagtatttttggaattcaactttatttaacatcgacagctgcatcttcgatatagcaaaaggataaaagttatttttcatagccgaaatataggaatgatatccgctaccagttaaattaggctttacattcgactcaatgaattcttccatatacattccgaatgtcttagtcttattgactttgatatcctttccctcttcaaatcctttttcccacgctgtcagtgccattttagctttttcgattgcttctttttctgtggatgcttttctctttattcgttttgggttgccggttttcgggtttggatacttactctgtactaaacactcccaagaactgtctgcaagctgtctagtgcttccatctccattaccttttctgcccatatatataacctccatctacgttactatcactttttcaagtgatacattctcataccgtccaaagtgatacttaaaagtgatattagttatataataaaacgtcaccaaacacttttcaattggacaatactgccaaatttcattgcatttagtgacgttttgatacgttttatttatttactttttacaaattttaaggcttacttgtagtttacgatctttccgaaatctggtttcagggaagcgccacctacaagaccgccgtcgatgtcagcctgagcgaataagtcaggagctgttgcagcgtttacagatccgccgtactggatacggatctctgctgctgtagcgtcatcatagatctcagcgatgcatttacggatatcagcgcaaacctcctgagcctgctctgttgtagctgtcttacctgttccgatagcccagatcggctcgtaagcgataactgctgtcttagcctgatcagctgtaacaccctggaatccaaccttaacctgctgacggatgaagtccattgtcacgccctgctctctctgagtaagtgtctcaccgcagcacatgatcggtgtgataccatgctcgaaagctttaagcatttttttgttaacgtcttcgtttgtctcaccgaagtattctcttctctcggaatgtccaagtactacgtacttaacgcctgcgtctacgagcatagcaggagcgatctcgcctgtataagcacctttctcctcgaagtacatgttctcagcaccaacctggatgtttgttcctttagctgcctcaacaacaggaatgatgtcgatagccggtacgcagaatactacatcaacttcgtcgttaacaacaagcggttttaaagtctcaaccagctttacagcctcgcttggtgtcatgttcattttccagtttccagcaatgattttctttcttgccatggttttatctccttttttgtgttcttggaacactttattttttatcagtctttatcgttagctgctgctacacccggaagctcttttccctcaaggaactcaagagaagcaccgccgcctgtggagatgtgtgtcatcttgtcgccatatccgaggatatttacagctgctgcagaatcaccgccaccgatgatcgttgttgcatctgtctcagcaagagctttggcaactgcttctgtaccatgagcgaagttcggcatctcgaagcatcccatcggtccgttccatacaacagtcttggcatcttttacagcgtctgcaaaaagcttctcagtctccggtccgatatccattccttcccatccgtccggaatctcaccacgttttacaacctggatgttgcagtcgttggagaagttatcaccgattctgttatctacaggaagaagaagcttcacgcccttctcctctgctttcttcatcatgtcaagagcatactgaaggtaatcatcctcgcagagggatgttccgatatgtccgcccatagccttggagaacgtataggacataccaccaccgatgatcagtgtatctaccttgtcaagaaggttgttgattacagagatcttgctggaaaccttagcaccgccaagaattgctacgaatggtctctccggattgtttacagcgtttccaaggaaatcgatctctttctgcatcagatatcctacaactgctgtttttacatatttggtaacacctacgttagagcagtgagctctgtgagcagttccgaatgcatcatttacaaatacatcacagagggaagcaagatcttcgctgaacttgtcttcgttctttgtctcttctgcacgataacgtgtgttctcaagaagaactacatcgccatctttcatctctgctacagcagcttttgcgttcggtcctactacctcaggatctgctgcaaattttacttcctggccaagaagctcagaaagacgaactgctacaggtgcaagagaaagctccggtttcggctctcccttcggttttccaaggtgggagcaaaggataacctttccgccgtctgcgatcagtttcttgattgtaggaagagcagctacaagacggttctcatctgtgatctttccatcctgaagcggaacattgaagtcgcatcttacaagtactttctgtccttttacattgatatcgtcaacactttttttgttcagcatctctatatctccttaacttttatttctgcaaaagcagatgaataagggcgagcggtattgttgtccgctctgttaacagtcatttcctcagacatttttttgtttgatcttttggaaaaaaagggcccggtcctcttcagaccggaccctttctgagtctattcttctacacccgttcgcagaaaattaagcgttcagaagttttccgaagtgcttgattgtacgaaccatctggcttgtgtaggagttctcgttgtcataccaggaaactacctgaacctctgttgtgccattctcaagtggaagtaccattgtctgagtagcatcgaagagggaaccaaatctcataccaacgatatcgctggatacgatctcatcctcgttgtatccgaaggactcattggaagctgctttcatagctgcgttgatctgctctttagtaacgtttccttcaactactgctgtaaggattgttgtagaacctgttggggtaggtacacgctgtgcagaaccgataagtttgccgttaagctctgggataacaagtccgatagctttagcagcacctgtgctgttcggaacgatgttaactgcagctgcacgggatcttctcagatcgccttttctctgcggtccgtcaagtgtcatctgatcgcctgtgtaagcgtggattgtgcacatgataccggatttgatcggtgcaagatcgttaagagccttagccattggtgcaaggcagtttgttgtacaggaagctgcggagatgatcttgtcctcgtttgtaagaccctgatggtttacgttgtaaacgattgtcttaaggtcgtttccagccggagcggaaataactacgtgcttagcacctgcatcgatatgagcctgagctttgtctttggatgtgtagaaacctgtgcactcaagaactacgtctacaccgatctctccccatggaagctctgcagcgttagccttagcatagattttgatctcttttccgtctactgtgatggaatcctcgcctgctgttactttatcagcaagagcatatcttccctgtgtagaatcatattttaataagtgagcaagcatcttaggagatgtaagatcgttgattgctacgatctcaaatccttctgctccaaacatctgacggaatgcaagacgaccgatacgtccaaaaccattaattgcaacttttactgccatgataaattcctcctatgaattgaatggtgatttaaatcgttcctttgttaaagaaacatcaacctgtttcatattgtacctaattccaaacaaaaattcaagagctatttataaaaaagaacattaaaataaatattaagaaaatttctgaaaaatgtgctataattctctgatagaaagttctgtcctgctgattcccaaaacggatatctatattcccgctggaagtttgactttcccggattcataacaggcagatacgatcattgtcacagaatataaaggcttgaatatggaggtacaaaatggaccagaaaattttatgggactgccatatgcactcctctttttccgcagattccgatacaccgatggaagaaatgatccagactgccgcagaccagggtctcacgggaatctgttttactgaacattttgatccggattatcccgatactccggaaaatcttgatttttccctgaacatccctgcataccgccagaaacttgagagtcttgcggatgcttttaaagaccagattcaggttaacttcgggatcgagcttggacttcagcctcagcttgcagaatctttttccgatcttctgaaagaagttccctttgatttcgttattggttcctcccatgtggtgcacggatacgatccttattatccttcttattttgagggccgtaaggaatccgcatgctacatggaatattttgaatccatcctggaaaatatcgctgcttttgacgagatggatgtgtacggacatatcgactatgtagtacgttatggtccaaatcagaaccgtcagtattcttacggacgatataaggagatcctggacgagatcctgcggacattgatccgcaaaaatgtgggaatcgagctgaacacaggcggttatcactacgggcttggtgaaccgaatccctgtgtcaatattatccgacgttaccgtgagcttggcggtgagatcatcaccatcggtgcagatgcccatactccggataagatcggctatgcttttgacaaggcggctgatgttctccgtgaatgtggtttttcctattatgctgtatttaaaaaccgccgtcctgtttttcataagctgtagctctgtttctctctccggtgagagagtttacatttttataccgaaaatatcattttatctaaggaggaactctatatgtcaacaaaaagactccagaaaaagaaagctgccatgcaggcaaaaaaagaaaagcaactgaaaaaaaatacctctgctgccggcaccagttccagtgctgccaaatctgttgaaaatgctaaagccgaagtgaaaaaacttgaaaccgtaaagaaggaaacgcttaaagtcgaaacttccaaaactgaaccgatcaaagtcgagacttccaagaccgaaccgatcaaggtcgagacttccaagattgaaccgatcaaagtcgagacttccaagaccgaaccgatcaaggtcgagacttccaagaccgaaccgatcaaggtcgagacttccaagaccgagccgatcaaggttgagacttccaagaccgaaccgatcaaggtcgagacttccaagaccgagccgatcaaggttgagacttccaagaccgaaccgatcaaggtcgagacttccaagactgagccggcgaaagttactacttccaagaccgagcctctgaaagtcgaaacttccaaggaggacacagcttacgatgccctctacgagaaacgtctgaaacactactacaatgatctgaaatggctttactgcgaactgttccgcgatcacccggaagttaccggcacattctcaagcctcacaaaaaagatgaaagaaatctaccgtgagcgttctctttccatgaaggaagctgaccagaactgcgctgcagatcctgactggttccgtaagactactttcaccggaatggctgtaaatcctgctgacttcgcagatactctttccggtctatctaataaactggactatatcagcgaatgtaatgcagacactctgtacctgacagatcttttccaggcaacctccaactgctctcttcgcattatcccggagatcggaacctccgaagatctgcatacacttgcagctaactgtaggaaagcaggtatccgcctggctcttgagatcccgttaagtctttctgtggatgacccacagtccggtgcgccatgtgtgctccagactccggcttatttcaatgcaatgcttcttcagatcctggagcttgcaaatgaaggtgcttctgtattcagccttggtatccttccgatgatgccggaagaaaatctctggaagcttcactctctgctgcgtatgacccgaatggtgtgtgagatcgtatgccccggaattcttctccttggcgaaacagaccgcccacctgcagaggctgctgcatttggcggaacttccgatatgccggaacttcacattgtaaacagcacccagctgatgtccgatctctggcataccgttgccacaaaggacactgcccttctccgccggggaatcgacagagctgcagaccttccgcaggcaccggtattccagaattaccttcgtaaccgcaacacggtacgctggaatctggactatgatttcctgaaaggaagctttatcacagaagggcctcacagagattatctgaatgaattcctggcaggtattttccctgattcctttgcccggggtgaaatttatgtgaatccggaaaccgaggaatcggagctctgcggaacaaccgcatctcttgcaggaatcgagcgttttgattatgaaggaaatatggagggtgtcagccggggaatccgctatgacgtagcacttcatgcattgcttctttccctccccggaattccggtacttcgaagcggtgacgaggtcggacagctgaatgactacacctataaaacagacatttccaaagctgctgatccccgctggctccacaatggacgtttcaactgggcacttgcccggaacagagccgatgccgaaacgatccagggacgcattttcaacagccttgagcagctggaatccatccgtgccagccatccggtatttgctcctgaagtttctgcacatacgctggaaacctgggaaaaagctctccttgccctggtaagagaaacttctgaagaaaaactgatctgcatctacaacttcagcgaccaggataaggtagcctggatcaacgaacaggacggtacctacacagatcttctcacaggagttcagagagacgcacaggctgtagagatcccggccttcggatttatctggcttatgcacacaaaataatagctttgtcaggcggatatccacaatctgcattctctacacagctctgcaccggataactggataactgcttcacagtttatttgcaaaaaaggacactgccattttcaacgggcagtgtccttttttatttctcatattattattttctcagcttatcaataaatgcagcaaatttcccctgttccccactatccagcgaacggctgtaaatatttctgagccaggccgtgatcacatcgatcaggatcggagaaaatgtcatcagaaggaacaccagaatgatcattccgaattccagcgatcccagtgtcagaagattctgcaaaaccaccgccgcaccgaaaaagatcacctgcatactgtaaatgatcacctttcgatacttattcagaggtgcataaactgtcttaagtgccgccatataattccatcctgttacaagcacacaggctgtattcagcatagcattggaatggtatacattctggcataccagcatcacactgaacacacagcccgtgatggtcacagcagccggaaatgcattcataaatacatgacgcaaaaatgtatggtcgatcttctcataattattctcctgtgccagaaggaatgtaggaataccaacagcgcaggcactgatcagagacatctggatcggctcaaagggataggaatccccgaagaagatcgtgatcagtgacagcagcacggaaaaaatcgttttgatcagaaacatagatgccgcagtgcggatattatttacaacccggcgtccctgattcacaatttccggcattgctgcaaaattagaatccagcaataccacattggcaatattcttggcagcatcactgccctcagccatggcaatactgcagtccgcctctttaagcgccagaacatcattgacaccatcaccggtcatggcaaccgtatgcttctgagcctgcaaagatttcaccattgcctgcttctgctgaggtgttacacgcccgaacacactatattctgcaactgcctcgtccatctgttcctgggttgtgatcgttgtcgcatcgatataatgctctgcatttttaaggcctgcacgtctggcaattgcagaaaccgtcaccggatcatcaccggagatcactttcagatcaacaccctgactttcgaaatatgccagcgtatccggtgcctctgcacggatcacatcggtaataagcaaaagtccgacaggttccagtccctccggaagctccgctccctcactcacatttacactatgggcaagaaccaacacacgaagaccttcctctgcaaatctgccacaatactccatcagctccgggttcccttccggaaaaagaaactgcgctgcacccatcagataagtacctgtatctgtaaatgcagctccgctgtacttcctgtcagaagaaaacgggatcacatgatccagctccatatcctgagatactttaaatcttgccctgagtgcatcggcagtggcattctgatccttcagcacagaaagcagatttcccatgatatgctcgatctcccggatcttctccggatcttcctgactatgtttctccgggtcagcttctgacttttcctgtaatacgagattcgcacttccatcctcctttgcgatcgcatctgttgctgaaactgcagaagtcgcagaactctcagttccattgctgtcaccttcgccggattcaggctctttcccggatattttctctgaaatctcatcatacaccggcggatagctctccaccgcctccacacacatggtaccctctgtgatagttcctgtcttatccaggcagagcgtatccacgcgtgcaagagtttctatacagtacaactcctgcaccagcgtcttcttctgggcaagcttcagcgcacccagagtcagtgccacactggtaagaaggaccagcccctccgggatcattcccaggaccgctgcaaccatattgacaacagaatcccggatattgtctcccacaaaataatactgtttataaaaaagcatcgcacccattggtacgataatgatactgatcaccttcagaatggcattcagggaatttctaagctctgaattatggcgtttgaattccttggcctcgctggtgatccttgacgcatagttgtcacttcccacatggatgatctggcaacaggcctgtcccgccgtcacaaagcttccggaaaaaagctcatctcccggattcttcggaagattgtctgcctcaccggtaagcagagattcattgacctcaagacttccctccaggatcttcgcatctgccggaacctgttctccggccttcaggaatatcagatcatcgacaaccagcttctctgtagaaattttccatttttttccttcacgcagaacaaccgtcttggattctgtcaggatggccagcttgtcaatcgtcttcttggcacggacctcctgaatgatcccgatcacggtattaataaaaatgattcctacaaacatggagtttttgtaggaaccaaccagcagtacgagaaccagcagcaccaggttcagaaaattgaagaatgtcaacgtattctccagaatgatctgcttatatgtcctggtgttggggttttcgttattatttacctggccctgcgcaattctttcctgaacttcttcgttcgtaagtcctgtcatgcttcttacttacctgtcctttcaatggcttacggttctgttcgactgaagcttgctcatgccccggttatgatcgtaaataaaaggaatcaatactcctcttctgtatcctcttcaccctcgtggatatcagacttcggtttggaaagaccctcgatcttaatgtgatgtttctctgcataatcccagagagctgcatgaattgcttcctcagcaagcagggaacagtggatctttaccggcggaagtccgtccagagcctccataacggccttgttggttacttccatagcttcctcaatggtcttgcccattacaagttctgttgccatgctgcttgttgcaactgctgcaccgcatccaaatgttttaaatttgcagtctttgataatatgagtttcgtcatcgatatcaaggaatattctcataatatcaccgcattttgcatttcctacagtacccacgccacttgcgttctcgatctcaccgacattacgtggatgctgaaaatgatccattactttttcactatacattattttttcctcctggcaagtatttttattattttttctgctttttaataaaatcttcatataatggagacatgcttcttaagtttgcagtaatatctttcagcttatctactacaaaatcaacatcctccattgtcgtctcctcgcttaaggtcatacggagagatccgtgtgcgatctcatgaggaagaccgatagctaacagaacgtgtgacggatccagagaaccggatgtacatgcggaaccgctggatgcacagattccgaaattatcaagcatcagaagaagtgactctccctcgatgaactggatgcttacatttacgttgttcggaagacgttttactttatctccattgagacgtacgtacgggatctctgtgaggatcctgctgatcatatgatctctgatctcgatttcttttgcagtacgctctttcatggacttgtttgcacgctctgctgcaagaccgtatcctacgataccaggaacgttctctgtacctgcacgacgttttctctcctgtgctccgccatgtacgaaggagcggatcttaacgcccttacggatatagaggaagccgattcccttcggtccgttgatcttatgtccgctggagctgagcatatcgatattgaactcatctacattgatcgggatctggccgaatgcctgaacagcatctgtatggaacagaattccatgctcatgtgcgatctgtccgatctctttcagcggctcaagagtaccaatctcattgtttgcagccataacagagatcaggatggtctccggtgtgatggctttctgaagctcatccaggtcaatgaaaccattctcatctacatccaggtatgtgaccttggcaccacgctctttttcaaggtactcgcaggtatgaaggatggcatgatgctcgatctttgttgtgatgatatggtttcctttatttttatatgcctcaaaggtcgctttcagagcccagttatcagactcggaaccacctgcagtaaaatagatctcctcttttttggctccgatcacatctgcgatctgctgtcttgcctttgcgatggcagccttgctgtttgccgcaaaatcataaacggttgaagcatttccataaaactctgtaaaatacggcagcatagcctccacaacttccggtgcggtctttgtggtagccgcattgtccagatatatcatttttcccattttcttttcctcctgttcaggataattatttttcgtgtattctccggctttcttcgatcagctcactgagcatcagggtatccactgcatctgtgatgctgtcgttgatcctcttccacactaatttagccacgcagagatcagaaccttggcagccaccgtcaccttctgttcccggacatgttgcagcctccaggccaccctccaggacacgaaggatatctcccactgaaatctcttctgccggtcttccaaggaaatatcctccggctgcaccgcggacactcttcacaaggcccgctttcttcaaaagtgccatcagctgctccagatagctgactgatatattctgacggcccgcaatactctgaagcgagaccgcttctttttcactgtaaagaccaaggtctatcaaagccttaagtccgtattttgctcttgttgacagtttcatccgctcacctctttttttcaattcccagtgttttcctcggatttcatgtttactctatcagaaacatatggttctgtcaagactaacttcttcatatactgacaaaaaagactcaaggttatccatgtcaaaaaaaatatttctcaaaggaaccctgattcttgcctgcacaggccttatcagccgtatcgcaggtttcttttatagaatattcctctcccatgccattggtgcggaaggtcttggtttgtatcagctggttcttcctctccagggacttatggccgctttatcctatacagggatccagtctgccctttcacgcctgatcgcgtccagacttgcccttcaggagaaaaaggaggcacgtttttcgcttgtcacaggaacacttatggctgtctttttttctgctgcagccggttttctgctttttcagcacgcatatttttttgcttccgcaattctgaaaacaccgcaaactgccggtcttcttcgcataacagctgtcagtattcctctctgtgccattcattcctgcattgacagctattattatgcccggaaaaaagcctctgttccggcagccgtgcagctttcggagcagtctgcacggatcggcactacctatatcctgtatctgatctttctttccgaaggacgtccgatcactgcattgatcgcagcgggaggttcccttgccggagagactgccgcttcgctggtgtcgctgctggtagtttcctttcatttcggaaatcaccctgtacacgaaaagactcccgtcaggatctttccgctgataaaggaccttttcacactgtcttttcccatttccctgaacaggatccttctgacacttctcggcagcatagaagcggtcctgatcccacagatgcttctgcgttccggcatgacagcctcagactcactgaagatctatgggatctttacaggaatggcactgcccctgctcctgtttccttccacacttacgtcttccgccgctgtaatgctgatgccttccatcgcacagcttgatgcactgggaaagcagaagcagatccgccgtgtcacagaacagaccttttttctgtgcatgttcctgggatttctatgcggaagcggattctttctttttggcccattcctcggagcattgctttttcacagccagactgccggaacctacatacggtatctgtcttttatctgtccttttctttatacaaacaccatgctcaccagcatcctgcagggacttggaaaaccggggctctgtctgatccacagtattgccggcattctcatccgtattttctccgttgtttttataattccggcaacagggatccgaggctatttttacgggatttttctgggtgagctgctgcttactcttctacacgtgaaagcgctaaaatttccctatcgacaatcggccaataatcgtttataataaataatcgaaatgtctatagttatggaggaataaagtactatgagttttgaattcataaaaaaactgccaactcctgaggaaatccgcaatcagtatccgctcgatgctgaacttcaggcgctcaaggagaaacgcgatgctgagattcgcgacgttttcaccggaaaatccgataaattcctcgctatcatcggaccatgttctgcagataacgaagatgccgtatgcgattatcttttaagacttcgcaaagttcaggaaaagatcgaggataaagtccttatcatcccgcgtgtttacacaaacaaaccacgtacgaccggtgaaggatacaagggaatggtccatcagccggatcctgagaaaaaaccgaaccttcttgccggactgatcgcgatccgtaagatgcacatgcgtgctatccgcgaaagtggcttcacctgtgcagatgagatgctttacccggagaactaccgttatctctctgatctgctttcctacgttgctgtaggcgcacgttctgttgaagatcagcagcacagactcactgtcagcggcatggatgttccggctggtatgaagaaccctaccagtggtgactacagcgttatgctgaactccattgttgcagcacagggcgctcatcgttttatttacagaagctgggaggttgagaccaccggcaacccactctctcacgcaatccttcgcggtgcagtaaacaagcatggggaagcgatcccgaactaccattacgaggatcttcgtcttctctatgacaaataccatgcaaagaaccttgccaacccggcagtgatcgtggataccaaccactccaactccaacaagcattacgagcagcaggttcgtatcgcaagtgaggttcttcacagccgtcaggtagatcctgagcttcactccatggtaaaaggtctcatgatcgagagctatatcgagccaggcaaccagaagatcggtggagatcacatctacggaaaatccatcacagatgcctgccttggttgggatgagtctgagaagctgctttacacgattgctgaaaattgctaagatctgtctgatctgcagttcaggaaacggatatttgtgatccttttacactttatgttcaaaaaaaagaaccggcattcttccattttggaagctgccggttcttttttgaacgcgttttttatattatttcttacagatcaatgcctcggatgtgctttcatatatacgtctcgcattttcgcaacgccaaaattcagatagacctgtgtggtggaaatatccgaatgtccaagcatttcctgcacactcttcacgtccgctccattctgcagcatatgtgcggcaaaagaatgtctcagtgtatgcggcgtgatatcatgctggatcccggcttcctctgcatatcccttgagaaccttccagaatccctgtctgctcatggattttcctgaacagttggtaaaaagactctccgtctcattttctttcacaaattttccacgggcttccttcagatatttctccatggctgttttgcatacatttcctatcgggatcacccgttccttatcctcatcgtgacagactacataaccaagccgcagattgagatcctccaggttcagccgcaaaagttcactgacgcgcattcctgtagcatacaaaagctccagcatggcactatcccggattcccttcggtgtattcagatccggctgtttcaaaaggcggtctacctcatccacagtaaggatctccggcatccgcttctcaaccttgggcggcttcagttccagagacggatccctctcgatcctgttctcctgataaagatactgaaacaaggcacggatagatgctacatttctggagatcgttgaggaagcgaactgtcctctctccatatagctgagatagccttccagctccagttctcctacatctcggatatcatagatcccacgatctgcaaaatacactgccatcttcttcaggtctctctggtaagatacttctgtattatgtgacgtcctttttctattatgtaaatatgtaataaattcccgtatctctatgtccatttctctgcatcccgtttctctaaaatcatactcgtttatgactgaattatactgtgaattttacataaaatcaaacagtttttcatcgtaaaaccgcacaatttcaacactttccggcgcaaaccaccaaatatcgcagattttatggaaaccattactagatattgtggaaattttcctcaaaaaaatttcaggccctttataactttttctacgatccagggattcagaaaactttctgcgaggattcctcctgtatacagcagaaaaactgtgattccctgccgaaaataagcccctgttttctgcggcacaagtccataatttttccagatcccatacgattgtctgtatacgatacctgcaagataaaaatacgccggaatatagaccagatactgcggcatcagaagtccggcaccggccacaccgccataaataccaaattccagaaccgataatgccaggatcattcctgtctccattcccaaaaacagcatatatgcgaccgtcaaaggcactccgaatattgtaaatccgcataaaaacaacagaagaaaaaaacctcctcttcgtcgcagcacttccaggaaataagctccgccggaaatatcttttcctgcaaagctgcggatcagataaaaagaagccagggttttctgcttccactccattttccagatcagattcggcaacacatttcccgcaaaaactccggtcataaaaagaagctccgccggaaaacgtccggcatttttccacttccggttctctgtcttactctccatttactcaccctgtaccagtttacgcctgtttttccagtaatatgaccgtttttccacatgacaaaaaaaggccggccagctaaaaagctgtccggcctttggtatttccagaactttcttccattgaaagcttattttgcgtagtcaaccgctctgctttcacggatcacattaactttgatctgtccaggatactcaagctctgcctcgatctgctttgcaatatctcttgcaaggagaaccatatctgcatcacttacatgatccggcacgaccataacacgaatttctcttcctgcctgaatagcaaaagatttctctacacccttgaattcattggtgatatcctcaagctgtttcagacgattggtataggtttccagggtctcacgtcttgctccaggtcttgctgcggaaattgcatcagcagcctgtacaatacacgcgatcagagattccggctccacatcaccatgatgagacgcaaccgtgttgataacgatcggggactccttgtatttcttgcagagatccacaccgatctgaatatgagaaccttctacctcatggtcaatggatttaccaatgtcatgaagaagtccggcacgcttggccatacgcacatccacaccaacttctcctgcaaggagtccggaaagctgtgcaacctcaattgaatgtctcagagcattctgtccatagcttgaacggaatttcatacgtccaagaagcttcagaagttccggatggattccatgtacccctacatccatggcagcattctcaccgtcttcccggatctgtgcttccacttctttctgggctttctctaccatctcttcaattcttgccggatggatacgtccatccacgatcagtttctcaagagccactctggcgatctctctcctgatcggatcaaatgcggagagtaccactgcctccggtgtatcatcaatgatcagatccacaccggtaagtgtctcaagtgtacggatgttacggccttcacgaccgatgatccttcccttcatttcatcacttggaagctgtaccacagaaatcgttgtctcggaaacatgatccactgcacatttctgaatggcattgactacatattccctggctttcttattggcatcttccttggctctgttctcaagctctttatagagtcttgcaacatccacctttacgtcatcttctacagatttcagtaattcttcttttgcctgttcggaggtaagacctgaaactcgttccagttcctgtactcctttttcctcaagttcatttactcgtttttctttttcttgtaactcgttaaatttcgctgtacattccagctcacgcttctccactgcattggcttttttgtcaacagattcctcttttgacaaaactcgcttctcgtatctctgcagctcgtttctccgttccttggtttccctttccagttcatttttagttcgcagagattcttcctttacttcaagtaaagtttcgcgtttcttggtctctgctgctttcaatgcttcatcaagaatattccttgccttatcctctgctgtacctatgatttccgcatccttgcgtactttcttgtcaacagcaaccttgcaagtaacaggaactgcaataagtagcgtgactaccacagcgacaataacaccgataattgtgcctgccacaggagcacctccttatttagttttcattgtacaaatacaacaatacaagtttagctgtttttcacatttatgtcaagtttttctcatgaaaaagcagattttggttagcatatataaactggctttttttctccgcagagttattgttactgttcactccgttctcagtaacacgcttcgcgatgcacagaatttatgctaatcgcataaattcgcgcggtatgtctcgggttttctgtgaccttcgctcacaaaaaacacctcgcgggacattaccagtgaacagtaacgagttattccatatcacggttcacccggatgttcatttcttccagggtatgggaaatatcctcataccggaacgctcgtctggccagatatccatacagccttcgcatctgtccttcatcaagctctgtgtccggcgcatatttcttttcgatcgtcctgcgtaatacctcccgctcgtccggttccataagctcttccatctcattccaggcatccagggcagtctgacggtccacaccctttaactgaagttccgagaggatcttctgacgactcctggtttccatgcggaaggagatataggttctggcataacgggcatcgttgatatacccataggacttcacataagcaatggcatcttctactgcctccggtgaaaattcagcctgacggagtttatccgtcaggcctttctctgtgcggtccatatgttccagaagccgcatggctttctttcttgcacggtttcgttcttccagatccagcatggattactcttccttctctgtatcttctgcctgtactactgcttctgctgtctcatctgccggatccagatgataatgtacacgcaccttcttctcgatctcatcgcgaatctccggatgctctctcaggaataatttggcattctcacgtccctgtccgatcttatccccttcatatgcataccaggctccgctcttgtttacgatggagcattctgcagccagatccaggatatctccctctctggaaataccggttccgaacatgatatcaaactctgcctgcttaaatggcggagcgaccttgttcttaactactttcacacgggtgtggtttccgaccatctcaccaccctgcttcaatgtttccacacggcgtacatccatacggacagatgcatagaatttcagcgcacgtccaccggttgtagtttccggattgccaaacatcactccaaccttttcacgaagctggttgataaagatcaccacgcagttggacttgctgataacagctgtcagtttacggagtgcctgtgacatcagacgggcctgcagacctacatggctgtctcccatatctccttcgatctcagccttggggactagggctgcaacagagtccacgatcacgatatccacagcaccggaacgtaccatagtctctgtgatctccagcgcctgctctccgttatccggctgtgaaatataaaggttgtcgatatcaacacctatactcttggcataaacaggatcaagagcatgctccgcatcgataaatcctgcgattccgcctctcttctgcacttcagcgaccatatgtaaggctaccgttgtcttaccactggactccggtccgtagatctccacgatacgtcccttgggaacaccacctacaccaagggcgatatccaggcttaagcatcctgtgggaactgcctccacctgcatatgggaactggaatctccaagcttcatgacagagcctttaccgaactgtttctcaatatttccaagagccgcttccagcgccttctgcttctcttcactgatcattatgtaatctcctattctttattctctttctaatcaggtttcctttaatccgaacctttgttcgtgttttctgtattacatagtattataaaacggaatgattgtcaataagatacttgaaaatccctctgtttttttgttgacaggatctctgaaaatccgacaaaaggcttcccatacatgatttctttttcctctctgaatgccaaaaagcagataaaaagatttccctcttcatctgctttttatgcaatatatttcctgtcactgatcgttggtcagcttcagtttgtccagaatatagaatacaaggcttaatgccatggcaaccacacatgccagcaccataccggtaagctcaacatttccaagcttcagggcaattccggaaagacctacaacaaagacaacgcttgtcagcgtcagatttctggacttgctgtaatccacgtgattgtcaaccagcatacgaaggccggaggttccgatcattccgtaaagaaggaaggaaatcccaccgatcaccggaccgggaatggtactgatcagggctgccagtttaccgaggaaggaacagcagatagaaagcactgccgcaccaccgatcacctgtacactgtaaacctttgtcactgccatgacaccgatgttctcaccgtaagtagttgtcggtacagaaccaaggcatccggaaactgtggtagagaagaaatctgcaaacagggatctgtggagacccggatctttcagaagatttcttccaacgatctttccggttacgatctgatggccgatatgctcggaggttaccagaagcaatgccggaaagatcgtcataatggcctcaaaattaaatttcggagatgtaaagttgggaagagccaaaaatgccgcttcccttacctgtgtaaaatccagaagcccgcatgcacctgctgccacatatcccgcaatgatcgcgatcaggatcggaataacagaaaggaagccccggaacaggatctgcccgaataccgcaactccaagtgtgaccagaaatacgatcacattcttcggatctaccttctcgtccagaagtcctgccgtacttgctgcatttcccgcaagttccagaccgatcagtgccactaccggtcccattgccgctgtgggaagcacgatatcgatccagtctgttccgcactggcggacgatcaatgccacgcacataccagcaatacccagaacaacgaaaccaccaagggcatactcatatccatacttgctgatcaccagaagagccggtgaaaggaaggcaaaactggagcccaaataagccggtgcttttccttttgtgatgaaaataaaaaggagtgttcccacaccattcatcagaagcacaatagccggactgataccaaaaaggaatggcaccagtacggatgctccgaacatggcgaacatgtgctggatacttaacggtatcagcatctttgcaggtactttttcttcgacctgtatgattcttttttccactctcaaatcctcctgttttttattatctcacagattatagcacaggttttcacatcgtgggagattttttacataaatatgcaggtattgtgtgttatactgttattatctccgtaaaaacaggcggattccataaatacagctgccgtctgttccggaaggaatttttcagaaaggaatattcttctatgaaagcataccaacgacttctatcctatgtaaaaatatccacacccagcaatgaagaaagctcttcttccccctcttcccagtgccagtttgacctggcccggcttcttgtggaggaactgaaaggccttgggatctctgatgtgtctctggatgaacactgttacgtttatgcacatcttcctgctacagaaggtctggagcactgcaaagcactgggctttatcgctcatatggatacggtttccgatttctgcgaccatgcagtcacaccggtggtcacagaagattacgatggaaaagagcttcctctcggcacaagcggcagaactctttccccggaaatgttcccccatcttgcttcacttgccgggcgtaccctgatcacctcagacggaaccacgatcctgggcgcagacgacaaggccggcattgcagagatcctcactgcgctggagcatatccttacggaaaaaatacctcacggacctctctgcgttgcttttactccggatgaagagatcggcatgggaccggcacactttgatgtaaaaaaattcggtgcggattatgcatataccctggacggtgatacggaaggcgagatccagtacgaaaactttaacgcctgcagtgcaaaagtaaccttccagggcgttaatgtacatcccggttcttccaaaaataccatgatcaacgcagccctcgttgccatggaatttaactccatgcttccggcggcagatactcccaggaatacagatgattacgaaggatttttccatctgtgctccatgaaaggagatgtttcccaggctgagcttcagtatattgtccgggatcacgatgccgcttcttttgagatccgtcagaaaacgctcacacatatcacggagatcctcaatgaaaaatggggggaaggtaccgtaactcttaccatcacccagcagtatcgcaatatgaaagagatcatcgatacctgcccatggctgatatctctggcagaagaagcctgccacagttgcggtgtcacaccgctgatcctgcctatccgcggcggcacagacggtgcacagttaagctttatgggactgccctgcccgaatctcggaaccggcggacatgcctatcacgggccttatgagcacattacagcagaaggaatggatgccgctgtgaacgttactctggagatcataagactattttcacagagaaaagactgaaaagaaacttttcttcgaaagtctgcattccctgaaatctgatataatgaaaaaatactcacagatcctccggctggaaatctgccggaacaaatctgtgagtattttttcctgtgctagctatgttcactttgaattctgcaccgaataactgtattgccgtttactgatcggacttacagatcagatgatcttcatcattctcgccagcttcttcatatatcttccaccaggcatcatacccagctcatcttcaccgggcttgcttacaaacagatatacaataaagtatacacctgctgccagcatcacggaaataccaagacagatcacattggaatggatcagtgcatacaatccgtaatacaccactcccgcaacaactcccatcgggatagatgccaggaacgggcttaaataagcacttctccacggattcttatagcccatatatttcttgatggaacggtcattgagaagacacatcacaactgcataaacgatctgggcgatgacaatggtataaacaccaagattggtaaataccagaagcagggccatggctatcacatctgccaccagtgcaatggctgcatggatcatcgggagcttcggcttgccgattccctgaagtacaccgttggtgatattggagttgccattcaggataatggtgattcctcccaggatcagaagctgtccgcctacgccattggttcccgggaagatcagtctcgtgatcggtccggaaagaactgcaagacctactgccgccggaatggatatcagcatactgatccatgtggcacggtctgtcttcatatttgcaccttcaatatcgtgcattgcataatgcgcggaaacctcagggatcatagatgtcggtgctgtacttgccagggtaagcgggatattgatcagcgtcatataatatccgtactcggaatacaaggtctggatcacgtccttggcagcacccttgatatccatgataccggaatacatataactgttgatatatccgtttacattataaataaaagcactgagaatgatcggcatgatgatgagcacgatattactcattacatgacccatactctcatttatagaatggcggtcattgacgatccttttccggatgatcttacggtttaccccataaacgatcagcataaagatcagcgcagaagccacacctgctccggtacccatggtagcacctgccgcaccccagcgatggaccagatccatatctcctgttgcggaaaaatgctggataaatacatgtgacatcagaagcgcaaaggttgccacaaagatctgctcaatgatctgcgagatcgatgtaggcatcatattgcggtatgcctggaaatatccacggaatacaccgcagagaccggacatgaaaattgtgggcgcaagcatctgcagtgccagacgggcgttagccatactgtccggaaccaggattcctgcaccaaatacacagatcagcgccacgataccgccggcaactgccgcatagatcagtgcaccgtaaaataccttctgtgcatccttatatctgtgaaaagcgatcttctccgccatgatcttggatacagcctgaggaatactgaaggacgcgatcatcagcagaataaaatatacattctgtgcaaactggaaaagtgcaaagctctgacttcccagtgtagttgaaagcggactcttgtacagcattccgatgatcttggagatcagcgccgcaaccataagaaaagatgcgtttttcacaagtgtgttatcattttttttacccattttactttccttaacttaaatattctcaatctgccagtcaacaggttctaccccattggctttcaaaaattcattagccttgctgaaatgcttgcatccgaaaaatccccggtaggcagaaaggggacttggatgtggtgcttccaggatcagatgcttcggattatgaagcatggatgccttcatctgagcaggccgcccccagagaagaaacacgatcgggcgatcctcctggtccaggatccggatggccgcatcggtaaactgttcccagccgatccctctgtgggaattggcctgatgtgcacgtacagtcagcactgtgttcaaaagaagcacgccctgctttgcccatttttccagattaccgttgtttgggatataacatcccatatcatcctcaagttccttataaatattcaccagagatggcggtgtttccacacctttttttacggaaaagcaaagcccatgagcctgtccgtcattgtgatagggatcctgtcccaggatcacaacctttacctgatgcagaggcgtaaaatgaaacgcattgaacatatcttccggcggcggaaaaatctttcttgttctgtattctgtcatcacggttttataaagtttggcatagtagggctgatgaaactcacctttcagtgcctcctgccagtctcctgctataggagccatatctatcacctctcatccaacttatcttctcacggaaattcctttttccgcaaggtaatccttcacttcccggatctccagctctttgtagtggaacagagatgctgccagtgccgcatctgctccgccttctgtcagtgcatcataaaaatgctccagggttccggcaccaccggaggcgatcaccgggatggaaaccgcatctgcaacggctcttgtaagttcaatatcatacccggtcttggttccgtcacagtccatgctggtaagaaggatctcacctgcgccaagttcttccaccttctttgcccattcaagagcatcaataccggtatccagtcttccgccatgtttgtagatattccagccgccatcctgtcttctcttggcatcaatggcaactactacacactggcttccgaatttctgtgcggcctcatggatcagctccggacggtcgatagctgcggaatttacagaaatcttatctgcaccttcacggagaagcttccggaaatcatctacggtacggattcctccgcctacggtaaacgggataaatacgttggctgcaacagctcttaccatatccaccacggtatcacgctcctcgcaggaggcagtgatatcaagaaaaacaagctcgtccgcaccggctgcatcgtaagctttggcaatttccaccggatctccggcatccttaagatcaacaaaattcacgccttttactacacgtcctttatttacatccagacatggaatgattctttttgtaaacatgattatgcctcctttccggtgcctgactcaagtgccgcaaaattctcaaggatcttcaagccccaccggctgcttttttccggatggaactgacacgcaaatacatttcccttctccacagacgcatggatgcatgtgctgtactgagtggtcgctttcacgatctcttcctcctctgcctgaagataataggaatgtacaaagtaaacgtatgtgttttccggaatacccttaaataatcttccgctgttctgaatatgcagggaattccagcccatatgcgggatcttcagtcccggacttggcgggatgcgcaggattttccccttcaggattccaagaccttccactcccggtgtctcatcactgctctcaaaaagcagctgcagtcccaggcatatcccaagaaagggcgttcccttttccacgatctcatgtattaccggaacaagtccgtattttttgagattttccatagcatcaccaaagcttccaacccccggaaggattactttatctgctttcagaagcacctggggatctcttgagacgacagtctcctgtcccagatactgaagtgctttttccacacttttgatgtttcctgcatcatagtcaatgattcctatcataataatgcttcctcctgctcttttgtatctcgatattcctctctcaccttcgatttacattgctttagtataacgcaaaaacaggcggttgcaaagacttttctctgctgccgcccattttttcacattatcacggtaaagttttattatttccggtccagtgtaaaccagaattccacgccattatcaaagttctgcacgccatattcctggttcatgctttccatgatggcctttacaatggataaaccgataccgcttccgccgtattccctggttctcgctttatcaactttataaaatttattccagagattaggtacatctgcctcagggatcggagtccctgtgttaaacacactgatcttcacacggttaccctcatcctgcagcttgatctcgatttctttctctccctccagatggttcagggcattgcttacatagtttgtcacaacctcttcgatcttaaactcatcggcccatacataaaccggcttctccgcctcaaagatcacttttgcatccttctgtccgatcatgatattcatggtctgaagcacgccgcggatcagggatacgatatcaaaccgctccattacaactgcatctttgccggattccagctgattcagtgtgagaagattttttaccagtttattcatcttggaggcttcatccataatgacatcgcaatagaactctctgctctcaggatcatcagaaatattttcttttaagccttctgcatagccctggatcagggcaatgggagttttcagttcatgggatacgttatccagaaattcctttcgcatcttgtcgatcttgatcttgtcctcaatgtcacgctgcagttcattatttgcagatttcagttcactgatggtagtctccagctgtgaggacatccggttgaaattatctcccagaacatcgatctcattgccgaccttgctctcgtattttgcctcaaaatccagatctgacatttttctggaaagttccgtaagctcactgatgggacgggtgatcctcctggtcacgaccataatgaccagaccacttaagattatgatcatcagacctaccgcaaagtaaaacttattggaaatatcagcgctctcccggatgctctcaaggggtgtccttatgataaaataatgttcctcatccagctgtccccagcattccacataatccattcccgcaaaacggtcatgcgactgctggatggtataattgtcaccctgcttcaaggtccggctcttatctccgtcctcatccagatcatagacatatccgaacagcttgctctgaagcattttttcattttcgccccaggaaagccagctggtattgctgctgtcaatgataacccaggaaagattgtttctggagcaggctctctggatctcatcgggaatactctccatacctttcgagctattgctgttcatcatcttgtcaatatctgtattttccagagttgttcggagattcagaagtacatcgatcttttttgtcacataatatttttcaagaaaggctccgttgatcacggtaatagtcagaatggataaaaacagcagaccgataaagtatgctgtgatctgatggcggagactgtggatcttttttattttttccttcggttttttcattctcctacctcaaacttatagcccatcccccagactgtcttgatatactcgcccttatcgcccattttacttctcagttttttgacatgagtatcaatggttctggcatctccgaaataatcataattccacacagaattcaggatcttttctctggaaagagcgattccctcattctccaggaaataagtcagaagctcaaattccttgaagctcagatccatcggtttatcatctaccgttgcctgatgcgctgccttgtcaatgacaatcccacctgctgaaagtatctcatccgggttgctctgtcccgttcttcgaagaatggcttctacacgtgctacaaggatcttggggctgaagggtttggagatatattcgtccaccccgagttcaaatcccagaagctcatcacgctcatctcctcttgctgtcagcataatgatgggaaccttggaatttttgcggatctcacgacatacttcccagccatccatcttcggcatcatcacatccaggatcagaagcgcaatgtccttttctttataaaaaatatccatggcctcctcaccgtcaccggcttccagtacctggaaattctttttggtgagaaaatcctttaccagttttctcattctgctctcgtcatctactacaagaatttttaatgcatccattctatcttcctccgtttctcagtcgctgttccggacagctgctgacagcccgaaatgctctgtatcatccctctttacaaaaagctgagcttttacttccggttcattctaaagcggatatttccattccgctttgctactgctcataatatatcacaggtttgtgttgtgtgtgtgaacgtaatttcatttttttaattttatccgcaaaaaaggagaaccctctaaaaggattctccgatcttttctcccatgaatactcttgtttcaattccttcacgggaattgtttaaaatatcttcatctggctttaccgcatttttttcggtgatcagcacaatggtggagcctccgaaagcaaaatttcctttttcgtctccccgtttcacaaatgctttccctggccggttttcgatccttccgacaagaagagcacctacctccatcatcagcacggtacggaaattctctgttttcaaaagagaatactctctgctgttttccttgtagatcggataggcatcgttggccacggggttgactgtatgcaggatccccgggatcctgatgcgtccggactccgccgcattgtccggataaatatatctgtgataatcctgaacacagagacgaagcacccacacatagccaccctgatatctttttccaagagaaggattcctgagaagctcatctatggtatattcggtctgtttgatatgaagacgggctttttcatctaccggatacacactcaccctgcagtcacagggactgataaaatgtcccggttccatatcaatatggcgggcaccctcccggatcttccgcttgaaaaaatcattgtaggaagtatatttacgcttttcataatcactcatatccagatgattgaaccgtataaagggtttcaccgctgctgccgaaagcctggaatccagaatccatcccatggcaatggaaacaacaggagtgaccagcggccggatcagcatgcgtccggctacagaaccgtagattttttccagaaggttgttctgaaaggaatcctcctctgtaatatgccccattctgtccgctgtccggatcatagattaccccctctctccatggaaagcttatagagataattgaacttccaccatccttcgttgtagaaaagtacaagaagaactgccacagcaactaccgcaacaatgatcaccagctccctgttggtgggcttacggaatttaaaatccaggataaacagaagtcctaccgtcagcattgcgatatgaaggagcaccacaaaccatttatactccggaaaaagcagggataccacaaatagaagcggcaggaccacagacatggatgtgatgggaagtccctgataatattttcggttttcggaggtttcattctgacgtttttcctccataacattgaagtatgccagacggatcaggcctgccagaccgtaaaataaaagaatagctattccgtaaatatgacacattccaagcttaaatcctagcacaatgggaaggatcccgaaacagacgatatctgcaagggaatcgatctggatcccgaagcatttctcttcctccgttctgttcttcttagttcttgcgatctttccgtcaaacatatcgcacagtccggaaaatgcaagacagcacaccgctgctgaaatatggtccgtcacagcgcagaagattccgatcatggaagaaactacgcttatgtaagtcattattaccgtgtaatcataaaatcctatcatttgcacacctcttttttctttttcatgtcaggctatattcacagtcccacaggagacttacctgatctgggtcaagcagatctccgcgatctgcattcgatcaaatctattcaggattccttttttccgatagtgagctgagccaccgcagtaaacaccgcactgatcagcagctctccgtaatatcccagccctctgctaagcaccattcccggaagcagcaggccaccgaataccggactgaaaatggtaagaaacaaagtctcactgattcccattcctcccggaagcggcagcatatccacagataccgatatcactgcctggagaaaaaggatatcccagaaaccggttccatggagtccaaaagcctgatatacgaaccaggttactgcaaacagtgccatacgctggataaaagtgatctctattactttaacgatcaccagcggattattcttcagatatgccgcagtatttcggtaagtatccatggaagcttccagttttttcatccgtccctcttttttcctcatcagatgaaaccgttccagaagattcatgcccttcatcaggatcgcttttgccaaaagcggatgaaataccagaatggtcataaaagtgacacagaagatattcagcatcagccccagataaaacaccggcaggattccttccagatatttgtgaagaaatcctcttccgaaaatcgcgatcccaataccgatcaccacaagcaccagcttataggtaatcgtcacgatcatcaggatcaccgttgacaccggaatggaaatcttctcttttttcatatagtagatctgcatgggctgtccgccgctggcggatggtgtgatacagctgaaaaagaatcctacagacgaaaacagaaagcaggttctttttttcagatggatcccgctggaacgcatcatataccagataatgatggattccccccagataaaaaatgctaccagtgcaactcccggaagcagccaccgtttatctgccctatgtatggcatccatcatggaagacaggtcttctccgtgaaaaacgccgtagatagtcagggcaaaaactactgccaggaacactccgttaaatatgatcttttttctgctcttcatcacttgacaccttctgtatagctgttgatcttcttttcaattttagttccaaaccgttcataaatatgccagagttttgttttctgtcccagaataaagcatacctgagccaggatcacaccacctgccacatccacaagtacatgctgcttggtaaaaatggtagacagaaaaaccagcacagccagtgtaaacgatacccccttataccatgtcggaattcttttctgatccttgatccccagaaaacagaaccagcttaccagacaatggatagatggaaacaggttatctgccgcatcaatggaatacagccagccggccagcagatcccagattccgtttccttcgatcaccggtcttgtattggtagtgggatatgccagaaatatgatcagacacacacaacgggatataatatccgcagtaaaaaaacggtaaacctgttcccgctcctgccttgccgcaaggatataattcactgcccagaatacataacagccaaaatagataatcaaaaactgcggcacaaatgggagccgcagatcaagattactttctatattgtgatgataccaaccgcctgcgatcgcccttgaaccggaatatacaagacagttaaatacaaatgaaaaaacaaggggaaaaagcccgtacgcaggtacgatccctgttacatatttccaaaaacgtttcataaattcacgcctcattattttattgatatcaggaataaaacatattcttctcctgctaacatctgctagtcacagtataacagtcggggcgtatggtttcaactaaatatggaaagtttaagaattgttaagatttgagttcagttattttttcttttttgttcatacttttttcagaatgacgtcacagaatgaccacaaaatatgagtatattattagatgtgcaaagggtactacctttgataacacttttttctttttcatactgccggggctacctccaaacaaagccccggcctccttcctttttattttcccattttttaattatgccatgcaagacgtacactggatggatgtacttcttttgtcatccagtccacatcgttggtgatccagtccatgatcccgagctggcgtgtctcccatgcgatggttgcctctcttgcttccggtgtttcttccacttccatggttgtgtcgatctcatcatatccaaaaatatatccgcccgcactccagatgctgaagttgctgtccgggcccggatctattgtttcgcctctctgcgccacaagtccgtcatgacgggctttatattcttcctcacagccgtcttttaattttgtcatgaacattctgtggcggatcagctctttgttttctctcacaacaccaaaattatgatacatcaggcgcatgtcttttccaggagtagagatccaggtaaaagtatctccgatcttttcagtcaatgctgcctttactttctcctcttccggagaaatcacctctccgtctgcattttcgtaatatccgaagatcaggtctgccgcattccagatgctgaaattatggatgccgttacggtcaagatatgcagtaagctccggccagatctcgcctaagttcttacggtaatcattcatttttccttcttttactttcattgcaaaagcatgtcgttccatttatgctatccccctgttttgatgatcctgtgctatgttttccactatgagcagatgtagttcttctgccctcatatgatttgattctatcacttttattttgtttttacaattatgagggtaggatttccgatcactgttcacaggtaatgttactgttcactccgttctcagcaacacgcttcgcgatgcacaggatttatgctaatcgcataaatccgcgcggtatgtctcgggttttctgtgaccttcgctcacaaaaaacacctcgcggaatattaccagtgaacagtaaccagataatattccgcaaagcatgttgcctgacacaaagttatccgtaacgattccctgagatgctcaggcaagatacaacatgaccatcagtggcatggttatgatacttaccagcgttgtcattacattgatggtgctggcatagaccgggtcctgatcgtagagctgtgccagctgtacaaccgttgttgccgacggtgtgatcactgccatcagactgataagcagaatggtttttccatcctttaccattgaagccaagggcagatacttcaaaaacaacagtatgagcagcggagtcaccaccattttcaagatcgtgatcagatagatcctggaatggctgaaaatatctttccattttacctccgtcatggtcattccaagcatgatcatacatacaggtcccagggtggctgaaatctggctcatggtgtttccaaggatcaccggcagtctaatctgcgtgaagaacagaacgattccaaggataatagcgatcagattgatgttgcagaggatttttttccagttgatgccggccttcgcctccatcagcgactgtccgtgggtccacatcaggatcatctgcacactcaggaaagcactggcatagatcacccatttttcaccaagaactaccgttacaagagggatcaccagatttccggaattggaatagatgatggattctttttctaccacacttaatttcagtggcttgccgatgatctgtacaaataccagaagaaaaatatggatcaggatggctgctgccactgccagaaggaagccattccggatgcttctggaatattcgatctgaaaagcattgatcattacgcagggcatgatgatgtagatacagatgactgaaagtgtcctgctgctttttgcatcgataagtccgcattttaccactgtaaatccacaggacatcatcagaaaaaatacgatgatctgctgcaataattgtaaagttatcattttttctctcctccgaacgcatcagctctgtcctatctctttcagggctgtctgaagctgcgtgtcttctttatgtgtaagttctgtccagtctgtgatgtctccggaaagctctgcttccacatccggagtgattccttttttgttgatatcattgccctttggcgtaaaatattttgcgatggtgatctttaccgcactgccatcggtaagaggctggatggtctgcaccacacccttcccataggtagttgttcctacaatcgttccaatcccatagtcctttaccgcccccgcaaagatctccgatgcactggcactgtttccgtttaccagaacagccagtggcatgtccagttcattttttccgtcgcaggtctcctcttccctttttccatttttgtcctctgtatagacgatcagtccttccggaagaatctggcgtaacacgccgcagactgcagtaagaagaccgcccggattatcacggagatccacaaccagcttcttcattccctgttccttcagatctgcaaatgcttttttatactgatcgctggtcacctcagaaaattcggagatccggatatagccggtgtctccggaaagcatctcatgggaaacggtctggatctccacatcccggatctccactttgacatcccgggttttctcttcgttttcccgctgtatggtcagcattacggaagctttctcactgtcacggaccatggcagcaatatctgaagtttctttgtctgtaacatcagctccatctactgccttgatcacatctccctttctcagtcccacctgttctccagggccaccctcataaagctgtatgatctttgcccctccggtgtcatccttctgaagaacggcaccgatccctacgtaggagccttcattggaagtattcagctctttatactgttctgctgtgtaataggtggagtacggatccttcaggccggcaagcaggccagcataaagcccctcacgcaggctgctttcgtctttttcatccagatattcttcatcgatcagttcttccaggtaattcagcttctgaaccgttttcacatcggaaagcgcattgcctttcggaaacagtactttctgatagctggtaaaaacagcgcctgtcacaaccagcgttgctgccactccaatggctataccttttttgaattctttatttttcatatttttcctttcttctgcacagccggcaaagccgataagatcacagattttctgtactcctctgtgcgccgttcggtttttatataccgaaaacggctgccgatattccgacagccgctgtatatcttatgatcacacatcttgcggatacataagattctctgctatttggttatactctgagatgttttcttgttgtgaaaaagcttcccaaaagaccgattcccacaccaagtccaagtcccatgggaaccagaccttcataaatctgccagattggaatgaaatccacgattcctgtcaatacattgaattttgtcagaataaactctacagcggaattatacaggaaaaacaggcagatcagcggtatcgccgcaccgatcacaccgaggaccataccttccagaaggaatggcagtcgtacaaaagcatctgtagctcctatgtatttcataattccgatttcttccttgcggacagaaatacccatagatactgtattgctgatcaggaatatggaaatgaccaaaaggattgcgatcacggcaatcgacacataagaaaccagcttgttaatggaaccaagtgtcctggatgcctgttcagactgatttaccttccggacatgttccagtccctggatataattcaccagttctgtctgcttggtaatatcattaagatatacctgataattggatgaattggcaagagggttatcatctttaaatccatctgccgcatcttcatctccaaaatatttctgtttgtattcttcccatgcctgatctgcggactgatagtccatcctggccacttccggcctggactgaatagcatcgccgatcgcctggatctcttcctctgaagtgccctcatcaaagaatactgtgatcggtacttcttcttccaccttatgggcaatattaccgacgttgttcacgatggaatagaaaatgcctaccagaaaaatgcaggctgccatcgtgatgatacatgccagggaaaacatccagtttctttttatattcttaaagccctgcttcagggtataccagatcgtactaggcctcatgatatcctccctctttctcatcgctgatgatcttgccgttgtgcatggtgactactcgcttgcgcatggcattgacgatgtccttattgtgggtgactaccagaactgtggttcctctgtcattgatctgctccatcagagccatgatctcttcagaggttttcggatccaggtttccggtcggctcatctgccagaaggatgtccgggcggtttaccagtgctctggcaagagcaactctctgctgctcaccaccggaaagctcatccgggtatgccttatactttcctgcaagtcctacctcctggagaacctccggcacacgtttgcgtatcacacgggtaggtcttcctatgacacgctgcgcaaatgctacattctcatatacattacggtcttttaaaagacgaaaatcctgaaatactaccccaagctttctgcgatacttggcaacgcgtctgtgtttcatcttctccagacgttccccgctgactgtgatcgttccgctggtagaatccagttctttcatcagaagcttgatcagtgtggatttaccggagccactgcttcctactacaaatacgaattcccctttatcaacatgtaagttcgcatgattcacagccggaagacccgggccgtaagatttgctcacatctacaagatcgatcatatatatcctcctctatattataaaagcataattttcttaatttttttgtaacattattgtaatatattttctgtttaaatgcaagaataaatttcccgggccctacaactgttactgttcacgttactgttcactccgttctcagtaacacgcttcgcgatgcacagaatttatgctgatcgcataaattcgcgcgatatgtctcgggttttctgtgaccttcgctcacaaaaaacacctcgcgggacattaccagtgaacagtaacctgttcactccattctcattaatgcgctccgcggaatattaccagtgaacagtaatcaacagccctcttcaaattatttattttaacgtaaaattaccaaaattacaatagagtcatggatgttatctgtgaagttcatgtgaattcgttactgctcactccgttctcagtaacacacttcgtgaatgcttccaaacaggagggacatttacacaatattccatgatgaaaaacgctcatacaaaaactgccacctattccgggaaggaataagcggcagtttacaagttctaatatgttgccttaatgtatcaaactatcatcctgcattccgaatgctattagtactctaatgtctccatatatttcatatatcgaacaaccatcagcgcgatcttaaatgtaatggcatcctcaaacactctcaaatcaagacctgtactcttctggagtttatccagacgatataccagcgtatttctgtggatatacagctgacgtgaagtttcagatacgttcagactgttctcaaagaatttatcgatggtgacaagtgtctcctcatcgaaatcgtccggagatttgttgtcaaagatctcgcggataaacatcttacacagaggaataggcagctgatagatcaggcgtccgattccaagtgagctgtatgcgataacttccctgtctccgaagaagatcttgcctacatcaagggccatacgcgcttccttgtaggaacgtgaaacttctttcaactcattgacaatggtaccgtatgccatgtggacatcctcaccatctttattcagatccagagtatccataatcgtatgagccagcttatccatctccggatagccctctccctcttccagttccttgactataatgatgctcttctcatcaacagcagtgataaaatctctgctctttccgccaaaaaggcttttcacgctctctacagagctgtgatctttctcctggttcagttccaggatcataactacacgacggacatctgcttcaatatgaagcttcttcgctctgttgtaaatatccaccagaagaagattatcaagaagaagattcttgataaagctgtctttgtcaaaacgctccttgtacgcaacgatcagattctggatctggaaggctgcaagcttgcctaccatataagtatcctcatcatctccgtgggctaccaggacatattccaactgataatcatcacagaccttaaagtactgaaatcccttgacaagctggctgtccgcctgggattctacaaaagcctggatatctgccggctggatctcaaaatcagaaaaggtagacgcaagtaccttgccgtctgtgtcaatgacacaaaattccgtccttgatatttctttaagtccctcgagcgtattctgtaacacctgattcgatatcattccgttcaatcccttctcacttatgtgtatgcttatcttctgtctttccctctctatctatggctattttaatacaaaatcaccaaaaatgaaagagtaaaactgaaaaaatttacaaatttttgttgaaatccgcctaatttttctctataaaaccttctccatgaacttctcttgcatcggaaacgatcacaaaagcgttgggatcaatatcatctaccagctctttcagcttcacaatttcctttttgtttaccacacagaagatgatcgtcttctcctgaccggaatacatccccttgccacagattcctgtcgctccgcgatccaggtcttccataataactctggcaacctcatccggcttctccgtgacgataaatgtctgtttggaaaacttcagaccttcgatcagactgtcggatacttttgttaccagataaaccgcaatgatggcatacagggcccgctggataccgaacacatacattcctacgatcacaataagcccatcaataaactgcatgatctgtgcgatggaataatgacgcatatacttctggatcagtgctgccatcatatccgttccgcctgtggttccctgtccaaggaaaaccattccaatgccgattcccaggatcacaccaccgtatacagcagccagaaggagatcatctcccgcaatattccacaccggctgaatggcaagccaggttgagagggagatctcaccgaccagagcttttcttacaaaggaaaagcctttgatccgccatcccagaaaaaacagcgggatgttcagcgtgatattggtaagccacagtggaaccccgccatctacgatcccaccggtccagtgcttcaccaggatcgcaataccggaaaagccgcctgttaccagcccggttgcatcaaaaacggaattgatggcaagtgccatcagcccggttcctactatgatcagaagataatccagataccagtccttttttttcacaagactcataaagtgctcctttcattttttacagcaattcccggaatttctgtcttgaaatgtcctcaatatttctattccgttgtgaaaatcccggaaatgctatagtatcatatgacaactgcatcagtttcccgcactgacgtgtcataaaaagaacgggaccgtacactattctgcgtccgttcccgttctccatgctatttttctgtctttttatttataaaatgaacaaattcatagctttccattatctgaaagtattttacgattctcggataaagcggttctgccttatctccgaaatgctctttcaccagcagggcaagctcctgcacggttttggctccatcgatctcaggccagataaaagttcccatttcatcaagatgaaccttggaaaaccttggcttgccaaaaaccttctgcgcgatggtattgaacatacccttattctctatctcaagaatgatccgctgcttcaggtcccggtgccaccggatcgactggtttgtttccgggatcagatcaagatagttgatatcctgtttcttatcctttttgttttttctcatcaggctttcttctttctccagatagagaatttaagcagtgacaggatcatgatgatcatcagcacaacgccgccgatatttccaaggtttacaacgccggacatatcaaggctgataccgacaactgcaaagatcgcaagaagaattccaacaagaccctcgccggcgatcataccagcacagtacagggtaccatctgtggactgagctgtcttggttttttcgtcaacaccttttctgctgtcaagtaatccacgaacgataccaccgatcatgatggttgcgttcaggtagattggaaggtaaagaccgattgcgaaaggcattaccgggatacggaggatctcaaggcagatcgcaaggaatacacctacaaatacaagtccccatggaaggtttccgcccatgattccctcaacgatcatcttcataagctgagcctgtggcgcagggatctctgctgtaccgtagccccatgctgcatccagaagatacagaacaccgccgatagcaagaccggaaacaacaacaccgagcatctcgcccatctgctgcttcttaggtgtagcaccgagaaggtatcctgtcttaaggtcctgagaggtatcaccggcgatcgctgcgatgatacagataacagaaccaacagcgatcgctgctgtcattccgtcgatacctgttttaccggagctcttgatcgcaaatgtagcaatcagaagagtagcgatagccataccggaaaccgggttgttggagcttcctacaagacctaccatacgggaagatactgttgcaaagaagaatccaaaaactacgatgataactgcaccaagaagagttaccgggattgccggaacgatccagatgataaataccattgctataacaccgagaaggatgaactgcatcggaagatcctgtgcggttctctctgtgcttgtgttcttgcttcccttcatactcttcatggagtcacggaaggttgtaacgatcagcggcagggatttgatcagggaaatgataccgcctgttgcgatagcacctgcgccgatatatttaacataagtagaccagatcgctgatgctccgccgtttgcgtaaagctgggcaatggtcgttccctctgctgccggatacatccatgtatcaggtccgaacaggcagatcagcggaatgatgaccatccagccgataagagaacctgtaaacatgtaggatgcgatcttcggtcctacgatataaccaacaccgagaagtgccggataaacctccataccgatctcacccttgaaggatttaaatgctgcagaaacatctgccggaagaagcttcagtccatcaacaacaaatttgaagatggcagcaagtcccataccggagaatactgtggaagcatttgctccgccttcctcaccggcaagaagaacgtctgcgcaggcagttccttccggatagagaagagttgcatgctctttaacaatgagggcattacgaaggggtaccatgaaaagtacaccaaggataccaccgcaaagtgcgatcagagtgatctcaacgatgcctggtttgcttgtaagtccttcctctgcccagaggaacagtgcaggcatggtgaagatagcacctgctgcaagagactcaccggctgaaccgatagtctggaccatattgctctccagaatggagtttctgcgaagaatcacgcggataacacccatggagataactgccgccggaatggaggcagatactgtcataccaacacgaagaccaaggtaagcattggctgcgccgaagatgacagcaagaatacatcccatgatcacagatgtaactgtgagctccggagtgattttctccgcaggaatgtaaggtttgaactctgtgtttttgttcatatttcctctccctttatctagtaaattagtaacgttatatagtatagcaaatttcgcagtattttgcaagaaattatatctgagatattatatattatttacaattttctgtataattataagcaaataattggtcactatgcagcttttatgctaacatagtgaccttattccttacaattgaatattatacatttaaaataaaatacttttttttttcagttgtccgtttccagctgttttgtcagatatcgccctacgatcttcgagaaatttccgatatcccggatataggcaaaatcctttccaaaaatcttcttttccgccggaagatccttctcttcgcctgcaaatacccccagaacactgacgccctggctccgaagacgccgcacctctgttgcagtatctgaaatggcatattttccctgataaggggccggattttttgcattggggcggtttatgatcacatcgtaggggcgtccgtcacttaagatgatcaggatctttttttcctcttccctctgcaaaagactgtatcccgctgcttttatggcaagcccgtcccgattattggaggaagtcacataattgaaaatatcctcatctgccgaaaccggatcatcatattcccggaacctgtgcaggatcgtatgatcccagaatgtgcagtagctcataacccgatgagggatttccacattgctcagggcagagctgatcatataagcctgcagtgccacatctccctgtcggctcatctgtgaaccactggcatcgatcagtatatccaccacaaaatccgtattgtctccacgaagaatcctcttaaaaagatttgcctcaccgcttctgcctatacgccacagcctggaaggaacgatagttccccggtctgataggacttcctggttttcacttcggatcaccagtgcttttttcaggagttcagtcaatatggcaatatttcgttttgcaattctgtgcttgtcatgatagatccatatgttcttattacgcagacgctttgcatactggtactgataattatcacgaaccggatttttcaggattccttctgtaaaatacaggctgcagtctccgtgtattccccggcacataagatggttcattcttttttcttccgcaggtgtgagataggtttttccaaaattcagttccacataggtatgagctttctgaagagcttcctctgaaatcaccgcgatcttgtttttcaccttacgtttttcttccatatcctgtgtcagtgaggaatcttcaatatctgtcatccggtctgtgagcttttccacgtaattttccagagcttcctcatacatctcttcattaagatagtcttcccatccaaattccgtcagttcttccagcgtcaccgccattacccgttcaagggaaccgtttttcttctcaaagtccggatcgatgaccgcattatagaggctgtcgatgatccgaatcagttccatggtgtctctgctttctgcgcaggcatagatctgatcccggaatgcagacagttttttctccagaggctgtacgcttcctgtaagtacatcacggaatactgcaattttcagcctgtctaacagcttatcgtagaaaggcagggtttcatattcctgatccaggatatcttccagagctttttttctcatgcggcgaaccccggggcgctcttcacagatccgctctcccactgccgcttcgatacagagctgtgtcagcccggtcagctccgtctcagaggcatccagatagattttttttacaagataaaggccaagcagatttttgtcaaaatatctggcaaaagccccctgtttgatcccatcgtaaagagcgatctcttttgagcggagaaacagcgatacatccggcttcacatccagtgtatagtcgccgcttaccgtccagaggagattacggatccggttttccagctccatcttgtaatcttctatagaaagttcttctgtcagatctttatgcatagacatcgtcctttgtccactcttccgggatccttgtacggactacatcgtccacgatctccttttcaaaaatatcgaaggttttgttcaccactcccatctgcactgctgccaggggagaaagtcctgcacgaacaatcttcatggcagccagaagtcctcgaagatccagcgcttttgtggagatctcactgtttacggatttcttctgaagatccataaatacaccgataaactgttccactgccttttcctttgcctccgggaacattttgcggaaaataaatcccagggtttcttctgtctgcgctggcatatcgatcaccaggaaacgagaaaccagagcttcgttcagctcctttgttcctgcatatccgtagttcatggttccgataaaacgtgccgcaggatgaaggtcgatccggtcatagcccggaacatcaatggagcggcgatagtccagagttgcatgaaggacagaaaccgcatcgttctttgccatattgatctcatccagaataccgaagccaccatactcggcacactgatagatgctgccctttcggaggcagacttcattgtttacaaaggtatccgttccgatcagatctccgctgtttgtattgacatggaaagatacattataaaccggacggccaaaagcatatgccagattttctgccaggatatttttacccgtagcctttgggcctgcaagaagaagattttctccttccagaagtcctgcaatggccatttccaggatttcttttccgtagaacggtatggacggtctggtaactctggctgcagccccctcgtcaacgttataattttttcgaaactcctcgatgccgtggatcaggctttcggaaacgttctgttcttttaaaaattctaattctatcatatatacttactcctgaatctgattgaatgccgcagatatcctcatccgcagttattatatgatcctatgacggataaccgcttacagattttttctccgccaggtaaaaaacgggacagatcttacatctgtcccgtcatttgatttcaaagatgccgctgcacccagggaacatctcttatttcctgattttatttaaccgatcatacctcaaagatcagatcaccgtaggatggcatcggccacatatctttatctacgatcatctcaagctcgtctacaggttttcttaaagcctgcattgccggtaccacgctctctctgaagaatacagcacggtcacgtccctcttcatgggattccgactcagcgatcagtccggaaagcttatccatagctgtcttggtctcagcaagaagtgcggaggttttttccagaagacttgtctgtacactgacatcaagcgctgcgctcactgccttcacagaattgatggactctgcaagaaccgttgtataacggatcactgccgggatgatctgcttagtagctacatccaccatggtcttggcctcaatgttgatagcctttgcatagccttcatactggatctctgctctggactcaagctctgctcttgtaaatacattaaaggattcaaaaagcttcacagctttatctgtagtcagcgcaggaatggcatctaccatggacggaaggatcggaagtccacgtctctttgcctctgcctcccactccggtgcatatccgtttccgttgaatacaatacgctgatgctggatcgcatactccttgatcaggtcatgtactgcagtatcaaaatcgtctgctgcttccagacggtcgcatgcatcgcggaatacttctgctgcaatcgtgttcagaactacgttgcactcggaaatggaatcacgggaaccaaccatacggaactcaaatttgtttcctgtgaacgcaaatggtgatgttctgtttcggtctgtagcatccttcatgaaatccggaagtgtcttaacaccggtatccaggatctcgccggtcttactgtgtgtggcggtacctgtgctgatcagctgctccagaacatcctgaagctgctctccaaggaatacggagataactgccggcggtgcctcgtttcctccgagacgttcatcgtttccaacgtctgctgcagactctctcagaagatctgcatgctcatcaacggcttttaggatacaggtgagaacaagaaggaactggatattctcatgaggagtttttcccggctcaagaaggttgatcccgtcatccgttgtcagggaccagttgttgtgcttaccggaaccgttaactcctgcaaacggtttctcatgaagcaggcagcgcataccatggcggcttgcaacttttttgaggatacgcatcatgatctggttgtgatctgctgcaatatttaccggtgcgtagatcggtgccagctcatgctgtgcaggtgcaacctcattgtgctgtgtctttgctgttacgcccagcttccagcactcctcgttgacttccttcatgtatgcggagattctctgacggatggttccgaaataatggtcatccatctcctgtcccttcggcggcatagcaccgaaaagagttcttcctgtatagatcaggtcttttctctggagccatttctccttatcaaccaggaaatactcctgctcagctccaacggaaggagttactttttttgatgttgtatttccgaaaaggcgaagaagtcgaagcgcctgtgtattgaccgcttccatggaacgaagaagcggtgttttctggtcaagcgcctctcctgtgtaggagcagaatgctgtggggatacataagatcccgccggctgcgtcatgacgtacaaaggcaggtgatgtgcaatcccatgttgtatagcctcttgcctcgaatgttgcacgaagtcctccggatggaaacgaggatgcatccggttcacccttgatcagctccttgccagaaaagcttaagagtacctttccgtcctctcttggcgctgtgacaaatgcgtcatgtttctcggcagtaacacctgtcagcggctgaaaccagtgacaataatgagtagcacctttctcaatagcccattccttcatctcatgtgcaaccacatcagcgatctccatggacagctccttaccctcttctattgtctttttcagttcgcggtataccttcttcggcaaacggtcctgcataacagaatcgttaaatacatcgcagccaaagatttcctttacgttgatataatctcccatttcttcctccttttcgttcctgtatatccagtctttcttatgaggaaagacattttcacctctgtatgatcaccttgtcttcggatactcggatcattcttcgctcttctgggtaatctccttgatctcctgcattttctggttcagccggctttttttctgtttcttactgctggtaagataaaggttcatggcctcatgaagattatcgatttccacatgggtctgatctccaccgaactctccatccagcgtccacggaacagcctcctctgactctatcacaacatgcgcagacttaaaagaataaatcagatctgtattatcctctgcagtaagaagcgcagtcatgatctcctgaagctccagcggattcttcggattggtgatcagtgtcacctcaaacagtccgtcattcatatccacgttttttccggtaagattcttaaatccgcctacagatctggaattgctgatcataccgtagataaaatcattctccacagtcagctcatcggaggttaccttcagatgataggatttcacctcaaaaagctgcttcatcccttccagcacataggcaacatgtcccaggatatttttcagatcctggtctgtctcataggaaacattggtaaacagtccaaacgcagccacataggcaaatgtctggttattaaatttaccgatgtcacagtgatagatctgctcctccatgatcatggatgcagctgcagtcatactcttcggcataaacagactgttggcaaaatcattggtgcttcctgcagggatatacccgatcggtgtctggctgcccacttccacgattccggtaaccacctcatccagtgtaccgtcacctccactgcaggcgatcagatctacctgatctgcatattccttcacctgttcataagcatccttcggtccctgcgtggcacggatgatcacttcgtacccacctttattaaagatatccacaatgtccagcagatgcatcttgattcttccttttcctgctttggggttgaaaacaaaaagcattctttttttcattatacaatcctcatttcccgaaatgattcgttatgtctattcttttactatgataaaaaaaacgatgtaaaatgtcaatcttaacttttcacatctggtcttaccacaggcagccgggattttataacaaaaaaagtccgaaaacccaataaaattgaatcttcagaccttttgttaaatagcgagagggggattcgaaccctcgacaccacgggtatgaaccgtatttcccagccttctatgattttatcaaaaaataagtcttataaaggcattctcacaatctttgttatatttatacatattttcaacgtttttttcgatacacaccacaaataattattaactttgcacaatcgtatttcaactatattgtaaaagtcattttacaaaattttctgattattgtaaatagagtaattaatacgaattaaaattagggtacaattagggtacaaatgtaattatctatttattagttaaccttatagctccttttagtatctaccatttttcaaatgatattatcagaaaggagcactcaaatgaaaagaaaaaagaggaaaaacaatgaaggttcttggggagaaaagacaatacatggcaaaaagtatctgtattttaaaaagacttacatcttatcggatggaaccaaagatgaaaaatactattacggagcaacagtaagagaaattaatgagaaaaaagaggaatacgaaaccaatctgtcaagaccttccaaaaaggacactatatttggagattatattacaaattggctttattcagaaaaagctgacactttatcaccaggttctttcgatgggtatgaacgcgcaattaatgtacggattagagattttaaactatatgatctatggaataaacagttaagtcagattgaccatgacgctaaaacggggattgaaattttcaaatgttatgttgaagctttaagggattctggatatgccagaaaaacaatcagcgaaataaccggtattatttctcaatgccttaaatatgcatccagtccattgagaagagatttaaagtacaattatatggagtatgtaactttaccaactgaagagaatgtcaaaaagcaccgtcgagagattcatttcatgaatgaagaagagcttgataaactgtatcatgaatgtaaaagaatcaatgaaaaattcgaaggcggcacaggtcccggaaaattgacatactccaataacggctatgcaattatcattattatgtataccggtctccgtgtaagtgaactttgcgcattgaagtggtctgatgtagattttgcaaatgctcggatatggattcatcgatctctacgaatgataaagaaccgtgctgaagatggaggaactaagactatactgattgagaaagagacaaaaacaaagaatgggcggagatttatcacgattacttcacgagtaagggaagcgttacaatttttcttgcaattcaaaacttcggaagatggttatgtctgtgtcaataaaaatatgaatcctgtgagacgcgaaagattgtggcgaagcttaaaccgtatgcttaagaatgcagggatgaatcattatacaattcatgaactaaggcattcgtttggttcacttttgctcgaaaaaagtgataatcaggatcgcgcgattgccgcgatttcaagaattttggggcatgctaatgttaatataacttataatatctatatccatatcttggatgcaagacttactacaacctttcagatactggatgattacactgtagaaaacgcatttaccggatgtgatatagagacagactctaacgaagctgatactaatatctcgaatgataacgataatattgattataaagaaaaatacgaagaattaaaacagatacttatgacactttccatgtcagcttagaaatacctgccatacaattttataattcaaatgtaagcagccctctactctaggactgcttacaagtttatctcagtattttgattttctttacaccaagcctcaaacttttcactgtcgatataataattgcggcctattctaatcataggaaaaccagggattttaataattgatgatgcttttttgtagctgcattgaaaaatatcagcaatgtcctttattctaaggaacgatttcatagtctatcatctccaaatgaattgcagtttcggcctgcatccctgatgtaatcagcaatatcccccatgccggcagaaggttccagaacttcctggatgttcctccactttacaccgctaaaaatcttatcaagcaggctctttggtgttggataaaagtcttttttcattgttgtttcctccttttttcaaatggttaacagataatttgaaaaaaggcgcaaaaaaacatcctgcaaatagcatggatgttttaattaactaaattaatgatatttcttcttctaggtaatcataagaatgatccaactcatacagtgtcgtaccattaacttcacatatgttggttacagtacatacggtacctactggtatatattctatctgatttcctcttgtatcggttgaaggcatttcaaccctcacttttgatcctactattattctgtccataatctcactccattcttgaattttttgcctatggattacacccgccgcacggatcgtacccctgcgagattggctctttcctgttcctataaaaatagactctatttttctctttcattttactcacggaaatgcaatcaggcaagtggaaaatcatcgagttcttatttcccacatatgtcgcttcagatttttcctggacgtgatcctgtgtctggatatcagaatcctcggtatgtgattccccggtatcacatagttaaagatattggtgtcattcaatcaattttgccgataaagcggtagaagatttctacctcctgttcccggcttccatcctcgcccttgaccgcttcatggacaacgattttttcaatcagcgtattcaaaagttcggcggtcagttctgtaggattgacatactgtttcatcagcgcaatccagctttctgcgtctgctacggtctggctctcggcggcgatagcggcttgaagctgtccgattttttcgtccagttgcgcctgctccgtctgatatttcccggacagcatattgaagttgtactccgtgatacgccccgccacccagtcctcatacatacgggaaaacagcttgtccacctcggctttccgcttctccgtccgcttcaattctgcggcctgccgtttccttgcggcggcctgttccctgtcgctggcgttcagcagacgcttcatcagttccccatcgccattctgcaccagtccagaccagtattgcagacgggagaggacataggcgtaaagcacatcatagcggatatagtgcatggagcattggcgtgtgccctgcccgtacttactgcaatggtaatggccgtagggcttgctgttctgccggttctccccgtaggacagcgaccagccgcaatccgcacattttaccagaccggaaaaaatctgcgtcgtaccgtccttgcacttcctgcggcggcttgctatctgctcctgcacctgattgaaaacctgctcgctgataatcggctcctgcgtgttctccacacgaacccaatcgctctggggcttgcgtattctccgcttgttcttgaaggaaatgtttgtttcccggtagtggacggtatggccgatgtaggtttcatctttcaaaatgcttttgacctgcgctatcgtccatgcgtagcttttttcctccggcgcgtccgcatagatattggcgaaagttttgtcccgccggaagttgatatatcccggcgtaggtactttttcctcaatcaatatccgtgtgatactggccgcacctctgccgtggacggcaaggtcaaaaatccgttccacaatccagcgtgtttcctcgtcaattatcagcttgtttttaatttccgggtgtttcctgtacccgatgggagcataagcgccgatacgctcgcctacggcaaatttcgctttgaaagcggcctttaccttgcggctcgtatcttttgcaaaccactcgttgaacaggtttttgaaagggacgaaatcggacagccctttttcggtgtcctcgttttctgcaatggcgatgtagcgcacacgcttctccgggaacagaaattccagatagtagtccatcatcacgtgttctctaccaaatctggataggtctttcgtaacaatacaattcactttccctgcgtccacatcgtccatcatgcgctgaaaattcggacgctcgaaattcgtcccactccagccgtcgtccacatactcgccgaccacatgaagcccatgttcttttgcgtattgttgcaggattgtccgctgtgtttcaatgctcacgctgtcgccgtagctttcatcgtcacggcttaaacgcagataaagagccgtgttgtaaatggtagtattgtaaggttgtttcaccgtaaaaaatcctccttttcaaagaaacaacccacgcttacaatacttttgctctggggcaattataccataagcgtgggcgtatatcaacgctgggccgtcaggcggaaacggctttttccgccgtgtgccggactacatcaacgatcagatcgccaagcggctgtccagcggcggcgaagtgttcggagattttgatacggttgttcccacatacaaaatactgcgtcccgttctctgccgtaatgacctgcccggtgcggggtatagaaatcatgtcgctttcgctttttaccatctagtgtcctccctgttttgatgatttgtcatgctatcggaatatctgtccatagcgtttacctctctcgtgtgtgccgctgctgccgtttcagttccgccagtatatccggcgggatacggtcgaccagccgttgtaaatcatccaattcgcttttcagctttgcccgttccatcgtatcttttatcttgcctttttcactggcctttgcccttgcttccagcttctcattttccgccaacaggtcattgattgtgaccttgtactttttcagttgcccggagaaattctccatctgcgggaaccactttttcagcatagagagggcttcctcttttttctttccggcgttcagcgggttaatgccgtccagcgtggcttcaatggctctggcctgccgggagagggaaaccgcctgtttgaaaagccgggtggggatatgcttccggcctgtcttgctggcgctctccccacgctccaagtcgggatatttctccaccatgtaggcgtgaaaatcgtcctgccacttcgtcaggtttgcccggttgccgataatctcctttgcacacaggcggttgtcctttgtcagcggaacaaaggtcaaatgcaggtggggcgttttctcgtccatgtgtaccaccgccgacacgatattttcccgtcctacccggccaatgaggaaagccgccgccctttggaagaacgcctgtatctcctttggagatttccccttgaaaaactccgggctggcggttatcagcgtatcgacaaaccgtgtgctgtctttccttgtccggcacccggcctgctcaatccggctctgaatgaagtggtaatagcgtccctccggcttgacgatatggaagttgtatttgctccggcttgtgtcaatgtcggggttgctggcgtattgttctttctgtctttcgtgatgggcttccagcggccttgccgggttgcccttgtgcttctcaaaccgtaaaattgcgtgttgtgccattctgctccttcccccattcctttcctatccgggttttccacagggaaaatcccgcagaaaatagctcggataggattggaatggatagaatataaatcaatctttttaatctttgtatttctatataccgtccggttttcgtacttcaagggggcggtttccgtacttcatgagtacggttttcagccctccggcgtaccagaacgggatttcttgaagtcggtgtttggaaccgcttcataggattttgggaaaatgcggttgggttttccacagccctgcttctggatctccaccagtccggcgtattgcagttcccgcagggtgttcaccgctttctgccgcccacagtggagcaggtcaaccacttcacagatagggtaatacaggaaaatccgtccgcagtcatccgcccacccattcttgcgggataactctgtccgacgcaggataaaggcgtacagaacctttgcctcgttggacaggggcttgaatgtgggggcttcaaagagaaaattcgggagccgggtgaagctgaacgccttttccggctggtggatatagatggtatttgtcatagtgcgttttgtggacggttagaagcccgttttccggggtgggcgatagtttataccacccgcccaggtttggggcttgcggagcctgataaatcaaggcttttttcgcgcctaactgtccacagcagacctccttttccgttcactttctgttttctgccgcctgtgaactctggcggcgcagtccgggcagtatttcccccggttggagcgtgggacgaacacgccgccgcagaccgcacagcgtttcaagtccttatcccggaaaatctccgcttccagcgtcccgtccagcggcaagagcgcccagcggaaccacttacagcagatcgagaaagaaaccgtctgcgggcaggtgcaggtgtccccatcgtcaaggacaatgcagttgccgtcctcgcagcaacaacactcccggcgtatcaggctggccgcctgttttctctgcgctggtgtcatgcggtaaagggaaccgtccggcctgcgttccagcggcggcaagtctttataggggttatctctcatgcgttccctccattttgctttccgttgccgttctccccgaaaaggcttcctgccccattcctgcggcgtgttccggcgttggcacgctccccacagcttcgggacaacttgtcccgaagcaacctctggacaaagtgtccagaagttggctccttgcggtgcttccccagccggggtattccttttcggacggtcattctgttttcaaggtgctgtccatcgatgaactaccctaagtctacacctaaatgaccgcccgtcccgtatatccataaggtaggaaatccgctcgtaaaacaacctatttccacgctttcggaattgtggtaaaatggaattatcatagagaaaaggggggctggatagtggccttaaccattcaagaacgcctaaaagacctgcgtgtggagcgtggcttgacgctggaacagcttgcggagcagacacacctttccaagtctgcgctgggtagctatgaagcggacgagtataaggacatcagccactatgcccttatcaagctggcgaagttttacggtgtgaccgccgactatctgctgggattgactgaaacaaaaaatcacccaaacgccgatcttgcagacctgcatttgagtgacgagttgattgacctgttgaaaaatgggcggattgacacagccctgttttgcgagttagctacacacaaggattttgtgaaactgctggcagatattgaaatctatgtgaacggtatcgccaccgggcaaatccaaaatctgaacgcatgggttgatgtggcgagggcggaaatcatggagaagtaccagccgggggagcatgataagaccgcctatcttctgaacgcaatccatgtgcaggagggcgagtatttcagccgccgggtacatgacgatatagacggtatcatggaggacataaaagaggctcacaaggggcgggcggagagtgagccggagaaatccgttgccgctgaactgaaaaaggatttggacgaggtggcaaacttcaaggggagccgtctggaacagtggttattgatttactgcaaacaaaaccgcattccctataaccgtctgacggaagaagataagcagagtttgatacggataggttccaaatcggattttatgaaatcgcacatatcacggcgagggaaaaagcggaaataggttgttgtagtcgtgcttatatgatataattagacaatatttctcggataggagcattggtcatgggaaagaataaactggatattatcaactttagtaaaatttacgacatgtttggcgaagaagctgccaaagatacactaaacgatgtaaattctggaagagtgagcgaaaaaactctggaaaaatatctttacacagacgaaactaaagaagaatatgcacagcgattgaaagatgaatataaagattttgagtgaggtggactattgatatgaaaaaaagcgatgtaatatatgatgataatgttgactacgatgcccttgaacagcacatatatgaagattccggagatgatgtattttatacttgccctatctgcgggggagaatacttagccacttttattacagaagaagatgggcaaactatgtgcattgattgttggaataaacgctatggaaagtaagaatgccaaataaaccaaaagcagccaccttgtggggtgactgcttttgatttattacttgccctgtttgtattttttcctgtcagacatatgttttgccgcaagcgaactgccatgccgcaacccgtccgccattagttccataaaaaacgaatctttttcctcacaaagattttcaagctgtttgatacgcttgcgattttgcttgttttcctgttctaactgagagattttctttttatcgctctttgacccaaatatgcccatgcaaattatcctcctttattattcgactatttctgtgagagcagctataatgtttgcttctaaagtttgctgttgagaagcggtcagttcatcagaggtacgcaccaatacagtgcctaccacggtatgagaacctgatgcaaaaatactcccgtcaaagctggcaaggtactcattacgggcggtagcgtcctctacattggcatagacctctatgcttccaccggcatcggttcctttttcgataagagaggtaccatatacttcactctgattcactaaatcacttgaaaaataaacttgagcagtatagccacccgctttatttaaattgccattcggatcgttatcctctgtaacggcagaaatatcaacaatgttttcaactttcttcaagcactcaataacatatgcttcggtaggagcatcaaccagcgcatactgcttgacacttttttcaagggcagattttttctcagagagatttgataaaacactgctataatcaagggaatctaactgttgtgttgcggctattatctcatcctcagttgcgggcatttccatgatggtttgtttagccgattttgcttcagaaatagcagtctccagtgtaggaatgagcgtttcatccaacgctggcttaccctctgcaacaagtgcttctgcttcggaaatagcagtgtctaagtcactgtttttttgttcggcagaacttctggcggaatcaaaagcgttaatagcttctatcatcgccttacacacatctacacgttcggcagaatctttataattttcataatcttcaatgctttcgtacaactctaaggcagcttggtaatctccagcttcctgcaatttgactgcctcattgtaatcgccacttttacatcctgttaaagacaaggcaataacagttgacaccaaaaagagtatgattttcttcttcataggttcctctccttctagaaaaaagtgcgtagccaaagctacgcaccgaaaaacgtagccggctctgttgcgacacagttcactccaaagcaggaaatgacagccaagcatacatttttaccaaaagtatgcctgcctcagagtctattaaactgtgtcgcactaatataatagcacaaacaaaaggtgagtgctaattttttaaatattttttttggaaaacctcaaaaaagcttgattttacgggctttttcgggctttccaattttttgatttttacaaaaaatggcttactacaccatttttacaccatttctacaccaatttgcgcgaaaactacgagccatgcagggggaatttcaggctgcccgatgggagtttactcacatgagggcagacttgaaattacgcctatacggcgacagccgcgaccgaatgaacgcagttcatgaggtccatggcgagtagttctgtaatcatttttaaaagaaatctgagccatcacataatctgaaccagatccatcttcgcgatctctcgttcaatcctggaccggtctgtgatatggttataaacttccatcgtgacactgatgttcgcatgtcccatcacgtactgaacgaccttcatatccagatccatctctgccatccgggtacaggccgtatgtctgagaatatgggcggaaatatgaggcagctcttccggctttctcctctcccgctttgcccgctcattttcttcctcattatacgccttcacaatatcccggagaataaagttcacggtagtcggcatcataggacgtccgctcctgctcatgaatacgaaattcgaaagcccttcaatcttcacatccctgggaatccccatctgaaaattcagccgtctctgagtctcaaaggcttttgccaccatcttgctcatggggatctcccggatcccggcttctgtcttcggcatggtcacatgaaaatcacacccgtctccatagttcttatagatcagctgatgattcacgtatacggtcctggtcttcagatctacatccttccaggtgagtccgatcagctccccacagcggagtccggttccgatcatcacctgcaaaagtggcagatagatatggaatacctcgctgttttttacatagttcagcagatttttctgctggtcaaaggacagggcggtgcgtttcttttctggttccccatagtctcccagcgttctcttggccggattcttccggatgatatcgtcatctacagccacctcaaagctcggtaagatcatattatggagaaacttgatggtactgtgggaatatttctgtttgctcagccgggaataaaacaagcgtacatgagatggtcttacctgtaccactttcatctgtccgagttcgttcctcacaagactgttccacatccttctgtaattggcctgtgtactctctgccagctttctggtatccatgtggatctcaaacaggtcattgagagtcatgttcttgcattgggtatcggtcataattccttcgctctggtctttctcaatctctttttcttttttcctgagttcagccagatccggagaataaacggccaggcgtctgccagtccgttcatctttataccggtacatatagagtccatccttgcgctgggattcccctgtcctcagatttcttcctctattgtcttttcttgccacaaaaccattcctttctctatttccacacctccctgttgtggggaatggtcttgtcctgtctatgaaaagtatagcacaaaaccaaccccacgcacatccgtgttcttttattccgctattgcttccagatatttctccaccttctgtacggagtacaatacccggcggccgatggtgatccgggcttccgcatcttccgcaatcttccttgcagtcatctgtccgcaggaaagcatagcggccagaccttcaatatccactgccagacggcagttgctctctctttcttttgtctgtctcatttacctcatctcctcctttattcttttctgcatccgccccagcttttcctgagccgtacgttttcgaaaactctcccctttaaactgaaccggcacgcacatctccagcaaccggtcataaatcctggcatgcgctgtatcctgcggattcttcaactcctgcagtgtcagattggtcgtcgcgatcaggggtttctcgctccgatatctgccatcgatcaccgcatagatctgttccagtccatactctgtccccctctccattccaaaatcatccagaatcagcagcggaactctgcacaaattttttatatatgtattcttctctgaaaaattagcagaaagatcattcagcacttccgcgaaattgttcatacgtacttctatctcctgttccaacagtgcattggcaatacagcccgccagaaaacttttcccggttcccactgctccccagaagacgtagcctgtattttccgccttcattgtttcccagtctttcacataaagctttgcaagcactatattttcggaaagtcccttatcattcttaaatgtccattccttcatggatctatccgagaaacaatgttccttcaattctctgactacagcttcatggcgttgctgttcccggtactgttcctcctcttttctcttttgcctccggcactcacattcacgcggatgtttttttattcccaaaactccgactttctcctgattgaaataagcctccttcggttcatggcattgtccacaatacaggagcccgtcttttccgatgtaatcttccccgtttctttctcccggctgcatcatgttctttactgtttcttctaccatcttgttcatagactgtcctcctcactgcaggtataatccggaatgttttttaccggggctgaccgctctgcccatcttctcaaggtaacggcatgatcggcatattgctttccactggaacgcatataactggacagttcctcgatcagcctgtctatttcccggatctcctgtttcaattctccatattctgtttcggagagaaacacattgtgatattcgccataggcagagcgcgcttctttctctttatttgtttgactatatatcaagtaactattatttaagtaattaggggatacttttctatccatcacagggacaggtttctttccctcataagtgtcattttctttccctttgagggacacttttctatccttcacagggaaacttttctttccctctgccgggattctgacatacagcagattcggttttgaaaatccctgtttttttctcaccagaagtccggcttcttccagttcattcaatgccttttttacagtcatgtgactctttccaagatcgtcagccagataagcaatgggataaaccacaaaaatgtggccttcctcatccttccaccccgtcttcctggaaagactcgcccgatccagcaacagagcatacagaaccttggctgtctgagtcagatccatccccagcagaaaccgtgggtaaggaagatataccggaatctgggtctgatccgtcatgtataccatatgatctttattcttcacatccatccttttgtttctgtctgattttccgccggcggcttcgcttggattcataacaggggcaacagacaatcacagtccggaaactctgcttgcagtctccaacacatttccggcaggtgtcattatgggcaacccgccctctttcattgagaaaaaaggccaattcctgtttccttttcttgctcattctcggcacagacattcctccttcctgccatcctgccagtacctggtacaggacaacgaaatatggtcgcgtttcggtatcattttttgcattttttgccctttacgacaggcttttttgacttcaaatatatttacctggggtttatcctgtctgacggcagaaaacgctgtttggtcatgtttcggtatcgttttggaacaattcatctggactactttaactcccccgataatcccgttcaaaatcccctgccatcttcaacacttcttccctgagtgcgaacaattctgcgatgcagtgacgtatttcatcctccatagccagtgaacgttccccacccgtattgaagtaccgtgcgatctgattcaggttcacaccgatctttccatatgcccccaccagacttcgcagttcttccatatcggcgaccacttctactcgatgcacgatttccttttccaccaaaagtttcctcaggcattcggatctggacacccccaggatctccgccttcctgtccagaagttccagctcaatatcggaaagccggactccgacaaaacgcggatggttcaattcctgttccattctcctttttctcatgacttcatctcctttctttcagttacttcagtaacaccacaaaggggagaaccggcagtcctgccggaatctaccttttgtgctgcgtcccactttccagtggacgccaatatctgccaaatcggcagatcatcgagggtatggggaatcgaaatcccaagcaagagccctacacaggaaaacacgatagtgtattacggggtggatcttgctctggaaaaatccccatcaagagctcaacctgtaagttagaggattgccaggaatggcataaccgcttaacacgggtggatcttgctctataatatttccccctcacttaacgtaaccgggagcggctattatacagggtcaaaaagaaataaattttgtttttatcaaccagatccgctcttatcttttttattctttaaagatcccctcacttaacccaattgtcagaggcagaaatacaagggattctaaaaatctttttaattttcttcttcaaaaaatatttcccctcacatatagaaaggaaatccgaagattatacagtgtttggagacaaagtttttaaaaaagtgcataaaaaaacatcccgtcttttttgaccggataccagattttaattcatagatttctattataaaaaatagccgccagattttccggcagctattcacataataaatcatcgccatattctttttttatcctttcgcacaatcgattccagctttcttcttcctcctctggagttctttctggcaatatcacatcttttatatcatcatcaatagcttttacatatttatccgttaaatccggatactcatccaacaacctttcgaaaagtttatagagtccccactccgtacacttagccagacatgaagaaaaaagttccattgtcatcggcttttgcttatcgattgccgccagctcatcttcggaaaactcgaatgttaaaataaggaattcttcaaaattatgtttttctttttctgatagttcatcatattttttcatcccagctctcctttcatatgtctctattatagatacatttttcagtatagtaaaccattatttttaccatgataatgattatattacaaactgggaagtgagaagaaatgataagctattctccattatgggaaaccatgaacaaacgggacatctccacctatacactgattcataagtatggaatcaatccccgaacgatcaataatttaaaacataataagtctattaccatgtttacgctggaaagactttgtgaaattttgaattgcgaaccgaatgatattatcagatttgaaaaagaataaaagctactgggacattgccatccagtagcttatatttatcaaaacgaaaaagaaaaatgttttaatccatctcgccaagctaaatctataaatttatttgtcatagagattttattggacatgattttacttaatacaaattatttctatcgccttagctattacatctattcttcactattgtttacaacccaaatctttttgaggggaatcaattctttgatttcatcatccatttggtcatagtatctcaaaaactcctcgataatttctttatgagtccaaaggcgtatctcaaaaaattgtttggctatttcgttgatgaccgaagatttaaacccgctccacgacaccaacaaaccatagtcggcattgaagtttttcatcacgccgcccagttgatccagtactatccgatccacaggcatatccgtagacttaacctgaacacagattttaggactaccaaagccaagtgtaccagcagaagccagaatatccacacctttatccggcccagccggactaacgtatgtagtgaacccttttgcacggagaattgcatctacaattcttgctaagccatcctcaatctttctgtggacaaacagcttagcataatccgggtctgatgagaaacccagccaaagtgctttattccttttgcaaggattctttaaacattcaagtgcagcattgagttttttccacgtactggctggtatactggtaaaactcttagctacttcttccggtgatatgcctttttccggatagtagattgggcaatattccacattatcccctatacggttttcttctttgtttttgatcatgatgcctgcagccgtttcattattacgcgtcaccatatcaactacaacctcatagctgtcgccaagtagctcctgcaactttgctgcaaagtcctttgcttcagtgactcctagccttttatcatttgcagattcatgattacgcgacatcatatcaaccgctgtatcaataccatcacaaagcgtttcctgcaccattgtcttaaattcctttgcattcatagtttccatcattttgagttcctccttttttctaattgatttcgttcaaaagatggaagaagaactattttctgatttgcatgccacaaccgcttccccttattgcttttaatcgcctagccgtttccatcgtgaccataaattcggcggcaaacggcgggatcatttccatctttctgttgtaatggaaaatgataaccagcgggatcattccgtcctccctgccttccataactgacgtagcaaatgctgtcttttcaggtgtatcgagatccagataatagggtgatacttgcgaagagagaacttcaatattctttccccaaaatgtattgtcacgaaattggccgcttacctgtactacattcccgatatactcacgacgactgcggcttcccataaatatcactttgattgattttttcttcccgacgatatgaagtaagtacataagtttcccgcttttgctttccttcctttcttctgattcaagatatcccatgatcttatgttttccaccagtaagtgattcgatcggggtacatccgtaagcctgttcatccttgtagttttcaaatggatcgtctgataggaatgctcctaaaagatgattttcctgttccatgttccatcgcctgtcacactgtccagggatatccttaaatgtatgttcgaacaatgcaaaatacgaattcaaattatctatctttgtatcgtataaacgtttacatgcttcaagcaaccatttacggtcaggggcaaacctgtcaaaggcgcctgtctgtataagtggtactatcatacgctttggcacgatgattccggatgcgttactcatacgctggaaaaaatcagctatagacaaatagggctggtttttcctattccccgccctattatctgttataaaatccgggtatgttcgttccccgatgcccttgattccgcgcatgccgtaacggatagcgcctttttctatcgtaaattcataataggaatggttgatatcgggaggcaggatccttatgccatcaaaacggcagtcctcaaataaaggagcgagctcttcctcatggttcatgaccgcacaataagtttctgcagggtaatggtatttgagccatgccatttggtatgaaataatagcatatgctgctgcatgtgatttattgaacgcgtatttcgcaaattctgtcatttcatcaaatatcttttcagcagcctcctttgcaattccgcacttgatacagccgtctatctttcgttctgcatccccataaataaatgctgtatgtttcggcaaaactttgtgaattccagttgtcaaatgtcttaacataattacgtttcacagctttttccatgcatgcaatcccaagatgctcatcaatgatcactgtgcatccgtctatgtcacatgtgagcagcgggtttccttctcccacgaccggagaggccgtgtatccggcatccgcaagcgccttaagaaccggttctttcgtagatgctgccagcttttcactcagctctttattcttctctttcatctcacctagttccttttctgcattgtcagccctgcgctctgctgtctgcatatttagtcgcatatcagaaagctgagacttgatcttttctaattcttcgttgtcttgcttgccagcagaccctttgctccccgttaccctgtgcctcaggatacgttggcccaattttatctggagctgatgatgcatcatccagaatccctatgtctttgccaaacaactcctccgcttctttaaagatatcggaatattcatcctctatgtcatccaacatattgggcgagatatcaaaatcatctatttccccgccgctgctttctgaggataccggatcatgtgcagaagtaatatgcgatgtaccggtatcttcggccgctccctctgccacaactctctcttcttcagcggtatgatatgttgcctctttacttgcgagtgcatcctgctctcccatgctttttacctgtcctttcttcattccgtcctgtcggtctgccgcatcctctttcaaataactttcgccatcttcaactttataattgtactttcttgatagatctgccatctcgtttattatgatcaaggcaaattcattcgacttttcgatcacaagtttttttgcggcgtcgtctgcaacagatgtaagtggtaagcatgcaatgaattctgaagctccatcatatacaggtaaatcctgtataaaatccgggttctggaaatactccatcctgtaatccagatctggtgaaattttgccccattttgtgatgttcccaagcgtatatgcagttccaagcttttcattcaatcgcttcagagcggcctcattcgtttgatagagtacatcatcgcagtcaaggataattctaagcatatattttcctcctttattcgttatttcttttgtaatatggaaaaatgtagttataaaaaatagtttttgctataatgattagtacaatgaaaaaagaggagacctataagcttaactaataatccagtcaatttggggaggtgttataagtattttatattttgatgcttagtaataattagggtacaaattagggtacaaaacgaaaaaacatttgaattgtatagaattgtatattgaaaaaagcccgtaaatacgggctttacgatgagtagcggaaactggatttgaaccagcgacaccacgggtatgaaccgtgtgctctagccaactgagctatctcgccatattcttttgtaacatgggacctatagggctcgaacctatgaccctctgcttgtaaggcagatgctctcccagctgagctaagatcccatataaatagcgagagggggattcgaaccctcgacaccacgggtatgaaccgtgtgctctagccaactgagctatctcgccatatctttttgtaacatgggacctatagggctcgaacctatgaccctctgcttgtaaggcagatgctctcccagctgagctaagatcccatataaatagcgagagggggattcgaaccctcgacaccacgggtatgaaccgtgtgctctagccaactgagctatctcgccatatctttttgtaacatgggacctatagggctcgaacctatgaccctctgcttgtaaggcagatgctctcccagctgagctaagatcccataacagttgttcgtcttaggaactcttccgttccgcaactcgctttgctattatataatggtttgtgacttgtgtcaacagtttttttcactttttttaattttttaaaaaatatatgcttttttgtatttttacagtggcagggaggtctgaaatcccctgccactgtaaggatgttatgggcaaagtattgcccataacttgatactcccggattgctccgctgcacgcagctcacgcaatcctcaaacattcggaatccgctaatttactacgtaaattgctacttcctcatgtttggcggggtccaagttcaaaagtcttatcgtgcaagcacgaacgactttttgaccttttccccctggtattatctgaagtactcaacaccagattcgaaaatcttgatatcctgctctccgtagatattgacagcaacgcctgcgtcacgacgctcactgtgtgccatctttccgagaacacgtccatccgggcttgtgattccctcgatgttcatataagagccgtttacgttaaactcaccctcatatccagtctcatctaccggtacatactccgttgcaatctgtccattttccttgagtttcttcagccactcatcatttgcgacaaaacgtccctcaccatgagaagccggattacagtatacgccgccaagctgtgctttctgaagccatggagacttgttgctgacaaccttggtgtaaaccatcttggatacgtgacgtccgatggtgttgtaggtcagtgtcggagaatcctctttctgtccacagatctcaccgtacggtaccagtcccagtttgatcagtgcctggaatccgttgcagataccaagagcaagaccgtcacgctcattgaggagcttcataactgcctccttgatcttctcgttctggaacgcggtagcaaagaatttcgcggatccatccggctcatctccggctgagaagccgcccgggaacatgatcatctgtgcctgatcgatggctttctcaaagagctctacagaatcatggatatcttctgctgtaaggttcttgaatacctttacgtctacctcagcgcctgctctctcaaatgcacgggtgctgtcatactcgcagtttgttccagggaataccggaataaatacacgcggttttgcaaccttatgtttgcatacatagatgctgtctgctttgtaaagggaaccgtcatctgccttgacgtcctcggttcctgctgctgttttaaatacattctccagagttccttcccatgtggaaagcgcctctttcagagtgatctctgtgtcaccgtaggtgaacttcgcattatccgtaacctcaccgatcacagtataggtaatggcaagctcaccgacttttccatccggaacctcacagatgatatcgccgaatgccggagcaaagaaatctcttggatcaaggttatgctcgatctttacgcccatgccgttaccaaaggccatcttgctgactgcggcggcgattccatgacggtcaagtgcatatgcggagatcacacggcctgcctggatatcctgatgtaatttatcatactgctccataagagccgggtaatccggaagatcataggaatccttcggtgcacggagccataccagcttgtttcctgcttttttgagctccggtgtgatcacatcttttacctttgcaacatccactgcgaaggacaccagtgtcggaggaacatcaatgtcattgaaggttccggacatactgtccttaccgccgatggaaggaaggccgaatccgatctgtgccgcataagcgccaagcagtgcggagaacggctggctccatctcttaggatcttctgtcatacgccggaagtattcctggaaggtgaaacggatcttcttataatcaccaccggttacaacgatcttggcaacagactcggttactgcgtaggcagctccatgatacggactccatgaggaaaggtatggatcaaagccgtagctcatcatggtaacagtctctgtttttccgttctgtaccggaacctttgcaaccatggactgtgtctctgtcagctgatatttgccaccgtgaggcataaatacactgcctgcgccgatggagccgtcaaacatctccacaaggcccttctgtgagcatacattcaggtcagcaagagtatccatccattttttctttacatctgttacatccggacgttcctcgaaaagatttccgtcctttgacgggatctcaacctcaacggaggtctcctgatgtgcaccgttggtatccaggaatgcacgggagatatttacgatctcttttcctctccagttaaggacaaggcgtggctcctccgttacaactgcaaccggaattgcctcgagattctcttcatttgcaaatttcaggaaagtatccacatctttcgggtcaactacaacagccatacgctcctgagactcagagatggcgatctcagtgccgtcaagacctgcgtattttttcggaaccttgtcgaggtcgatctgaagtcccggtgccagctcgccgatggcaacggaaacaccgcctgcgccgaagtcgttacatttcttgatgatatggctgacttcctctctgcggaacattctctggatcttacgctcggtaggcgcgttacctttctgcacctcagcgccacagacctcgatggaagcctctgtgtggaccttggaggaaccggttgcaccgccgataccgtcacggccggtacgtccgccaagaaggatgatgatatctccagggtcggaattttcacggatgaccgcacgtctcggagccgcacccataaccgcaccgatctccatacgttttgcaacgtagtccggatgatagatttcttttacagcaccggttgcaagaccgatctggtttccgtaggagctgtagccgtgggctgcgctgcggacaagcttcttctgcggaagtttacccttcagagtttcctttacggatacggtaggatctgctgcacctgtcacacgcatcgcctggtatacataggtacgtccggaaagcggatcacgaatggctccgccaaggcaggttgccgcaccaccaaaaggctcgatctccgtcggatggttgtgtgtctcgttcttgaagttgatcagccactcttcttctttcccgtccacgtccaccggtaccacgatactgcaggcattgatctcatcagactcttcctggtctgcaagcttgccttctgctttcagtttcttcattgccataagtgcaagatccatcaggcagacaaacttatcatcacggcccttgtacatatccttatgggcatccagatattctttgtatgttttttcaataggagtcttataatcaccttcgtcaaacttcacgctggtaagctctgtggagaaagtagtatgacggcaatgatcagaccaataggtatccagaacacggatctctgtcatggaaggatcgcgtttctcttcatttctgaaataattctggatatgctggaagtccttaaatgtcatggcgaggttcagagaagcgtacagctccttcagatcagcctcagccatatccttgaatccgtcaaaaatcttcacatcctcaggatccgggaatactgttaccagtgtttctggcttctcaagacctgtctcacgggaatccacagggttgatgcagtgatgtttgatcgcctcaaactctgcatctgtaacgtttccttcgattacataagtagttgctgaacggatgatcggtgctgcattctcatccaggaactgtacacactgcactgcagaatcggctctctggtcaaactgtccgggaaggaattctacggaaaatacacgtgcgccctctgccacatcaaatttttcaagatacagatcatctaccggcggctctgcaaatacggtcttgcaggctttctcaaatacttcatcggagatattctccacgtcataacggatcagctcacggactgctgtcacagtgctgataccaagataatgtttgatctcatgtttcagttcctttgcttttactgcaaaggcaggtttcttttctacatacacacgtcttacgttgctcatagaaggctcctttctctatatccgataataaggatggtaaacgtgcagaaagcatttcagtctttcttttctgctgaaaatatagtatcataggaaatatcattagtaaaattaatatatcttatatcatttataagcggaggatttttcacatatggatatcaatcttgaactttacaaagtgttttattacgtggccacgacgctgagcttttcagaggcttccagacagctttttatctcacagtctgcagtaagccaggccgtcaaaaaccttgaaaaaaagctgggccatactctgtttgtgcgcagtaccaaacgggtcatcctgactccggagggagagcttcttctccagcatgtaaagccggccctttccatgctaaacgagggagaggctgtcctttccggagaaggaaatcttaccggtcagctgcggatcggtgccagcgatactctgtgccgctattttctcatcccctatctccgccgtttccacaaggatcatccggaggtacggatcaagatcatcaacagtacctccatcggatgtgcggagcttctggaaaacggccaggctgagctgatcgtcaccaactacccgaattcccggctttcagcccacaccaagcttcagactgtgctggaattccgggatatcttcgtggcaaatccggactatttcaccatgggcaaatcgcctctttccatggaaaatcttctggattatcccatcctgatgctcgctccaaagagtaccaccagcgaatatcttcatcaggtgtttgcagcccagggactgaagctgctgcctgaggttgaactgaacagcaacgatctgctgatcgatcttgcagagatcggacttggtattgcctgtatcccggattatatgctccgcaaccgtccgggtctggaacctgtccatctgaaaacacctctgcccgcaagaagtgccgtgatcgctcatcatgaagcactgcagctttcccaggctgcccagtgctttcttaaatatttttcccagatctgatacgatcaagttcctgccgcttactgcttttcgcgatcgaagcaggatacttccctgattcagtaaaaaagccaccggaatctgccataaggttattacgatccttatttactcaattccggtggtcttttctgttattgatatcggtcagatattattcttattacttacgcttcagccttcggcatcacgtctgctgccgcagtgatatactcattctcgatcttactgaacagaccgctgtctgcaagctctgcaagcttcacgtcaatcggcatcttgcccaggaccggaaccttcagttctgcagcgatctcatcgatatggctctcgccaaagaccttgatctcttttccgcagtccggacatttcacatagctatagttctccacgatcccaaggaccggaaccttcatcatatcagccatgttataggccttcttgacgatcatgcggaccagatcctgcggagaagtaacgatcacgacaccctcgatcggcagggactggaatactgtcagcggaacatctccggttcctggcggcatatctacaaagagataatccaattcaccccagatcacatcactccagaactgttttaccatatttgcaaggaccggacctctccaaatcaccggtgtctcctcatccgggagaagaaggtttacagacataacctcgattccgtttgcagttggcatcggatagattccattgtcactgccctgtgcattgcccttgatgccatacatcttcgggatggacggaccggtgatatcagcatccataatgcccactttatatcccttggaagccatcaggtttgccagggagcctgttacgaaggatttacccacgcctccctttccgctgacaactccgatcacatgttttacgtcagaaaaaacgtttggttctgccatgaggctctggggctgtttctgtccgcagccttcacagcttgatttgttgcaggatgtattgctacactcttttgccataatagattcctctcattctttgtatttacacagacagaactggctctctgtccgtgtatttttctcattcatgagctctcatgaactccttaccttacttcataaatctgtcgattgctttttccagttccttgatagcatccctgtctccatgctccactgcatccacgatgcagtgttctatatgatcctgcaggatgatcttgcctgtattattgatcgcagattttacggctgacagctggatcagcacttcgctgcagtcacgtccttcctccaccatacgcttaatggattccatatgcccgatggccctggaaagtctgttgagtacggccttggtctgtgcgtggctgtgatgatgaggatgtgtgccatcgtgagtatgcacatgttcctgttccccgtgggtatgttcaagaacggttccatcctcgagaacgtgcacatgtgtttctttcatgtgtatttcctccttcagatctccgtgaaagaacagcgctgccggatcatagatgtctgaatgtcaaaaatgatggttccgtcttccattactgtcttctcgtaggagacatccttcccctgaaatttctgtttcacatacgcttccggatctgcaatctccacttcttccacaaatacatcacgcatctgatttctcggacatttgttaaaaatttcccagattacttcgtactctttcatctgtgcctgttcctttcttagtcatcctatccattataataattttatgtttttttgtcaaaaataattgcactcacgcaaatattgtcgtatgatacatattaaaaatattactgctctgtccgtgggcagtaaacatatattaatgtgataaatcaaaggagataaatttcatgcagcttttaaaagacagaattctgacagacggcgtagtaaaagaaggaaatattttaaaagtggacagcttcctgaatcatcagatggatattgacctgatcaacgaggtcggcaaagaattcaagaaacgttttgaccactgtccaatcaccaagatccttaccatcgaggcttccggtatcggtattgcctgtattgcggcacagtatttccatgtaccggttgtatttgccaagaaagcacagagtgtgaaccttgacggcgagatgtacaccaccaaggtagagtctttcacccacaagaaagtttacgatgtgatcctttccaagaaatttctcggaccggaagatcacgtactcctgatcgatgattttcttgccaatggctgtgcacttctcggtctgctcgacatcgttaagaaatccggcgcaactcttgaaggagccggaatcgttatcgaaaaaggcttccagtccggcggacagaccatccgtgacatgggtatccatctggaatcccttgctatcattgattccattgctgatggcaaacttactttccgtgaataagatttatcataaaaaatactcctggaaacttatatacattgtttccgggagtatttttatcacagccagatcatgatatcatttctgatctatgcatctgcacccttttccgctttctctgaaggtgtcggagttactgtttcctccggtgtcggtgttccggaaatttccgtttcttccttttccgatgaagccgatgcagcttccggtgtattttcatctatatccggttcttccgtcaccgtagcttccgatgtcactgtcggcgttggtgtggcagttgcctccggcatgatctctttctcttcataatatccgtcatccacaagcatctgataattatctgcatcgatcatctggatatcactggtcacagttcccacgatcttagtcccattgtcatactgctcataatcggagatctccggcttctcccctttcagaagagcatccaccatcgtcacacagtcatttgccagtacacggttatcaaacagcagatcatcctcaatctttccctggatcacagcggtcactgcttctgcctcacatccgcctcctgtgatcataggccagccatcctctccagacacatgtcctgcatcctccagagcatccacagccccaagtgcaaggtcgtcggcacctgtgcagataatatccggcgcaccctctgtataattctgagaaaggatctccgccatatcattctttgcggtatttcttccggaacgcatcactgcagtatcatcaaaggtcagctttcctgaagtacataccagtgttccgtcgtcgaaatattcctgaaacttctccatcacgccattataaaagaacagtgcgtcacgatcatccggagagcccataaggaactcaatggtcagagttttcttttcttcccgggctttctccagatccatttttttaatgatggaatctcccaccatttttccggcttttcttgtattaaaggtaacataatagttgaccttatctgtatccatgatcagctgatcgtaagaaatcacagggatagatttctcatacacctgctccagcacatcgttcaggctgtaagcatctgaaggtgcgatgacaagtgcagaaagctcttcatcgtccagaatggactggatctgtgatacctgcgtatcactgtcttcatctgcccaaaatatctctgcatcatatccatcgtcttccagtgtattctgaagagtttctccatcagcagaccaacggggatcatctgctgatgaaggcagaaacacacctactttcttatctgctgccgcagtttcttttgcttcttctttttcttcttcctctgcatcattgctgtttttggcttttccttccgggtcttcagactccacactttcattggctgcctctgtcgcctctttgttttttccacagccggaaaaggctgctgtaaagacaaaagctcccacaagcaggattgctgtttttttcttcatgatcaaatctctcctataagcctttatagtcctttgccagtgatttcagatagtctctgtaggcggctgcagatttcttgggtttcaggatacgtacactgccgcccatcccggtcagccagccgtagaattttccattttccggaagctctgcagttaccgtcagatctccgctatctttcatcttatattctgcatctgtgccgaaaaagtcacgcacctccgcctgtacagctccagtacagagaagttttatttctttttttatggttccggctgaagcctcaagaagcttccggtaacctgccacagaggtctcatgaatatctttagtttcatgaatctccttagcttccgcagtcagcccgggttcttcagacggctgttcctctccggcactctcaccggcaagataatacccacccggccgttctcttgtataacggatatccattccaaaagaacgtaatacctccacatcatcataaatgctctttcgctctgcacggattccctgtttctcaagattctcaaggatcttctgcatagatattacccgatgctcccctgtttcccgcagcattttttcaaggtacaggatcttcgccttctgattgtttgattttgccatactgccctcttatccttcgttttttacaaagcgatggaaaatataggagtttgcctcctgttcctcgctgtcgtccagtttctcaagttcgatctttttaccgtatttcttttccagtgcacggctgatcagaagatctgcaagctgcgggttcttgggaagaagcggtccgtgaagatacgtaccgatcacatttttgtatacaaccccttcctcaccggattgtccgtcatttccgtatcctgacagaacctttcccagggatctgttgtttccgatggtggtacgccctccatgattttcaaaacctacgatgggcatatcaaaaagatcgctctgcatcacaatgtttccaataaggcggccttttccctgctcagtgctcatatctacaagcttcagaccctcgatcattccctgatccgtcttataataatttccaaggagctgataccctccacagattgcgatcacaactccattgtcttccacatacgccttgaaatccttctggatttccttcagcttttcacataccagcatctgttctctgtcggagccaccgccaagaagtacgatatccagtttggaaaaatcgattctgtcatccagttcataagctatggtttctgcctcgattcctctccagagacagcgcttcatcagacactggatatttcctctgtcaccgtaaaggttcagaagatccggatataaatgccctatcgttatcttcatttctcaccctccagtttcttcaggatatttctggtgccaaacagcgccgtataatttacaagtacataaagattgccgcatccatccccgattcgtttgcggatggctgtctccacatcattttccagcatggacgggatatccacatatttcagacggaggcgcatatcctgacaccggataccactgactgtgatggaattgatattgtcccctccgaaaagatcaaaatccacatcccagagccaggagatatcttttccatcctgtgcattatcattgatcacaatgatgatatcctttggtgatccgtcctgcatcacagctgaaatgttctggttaaaaccggccggattcttggcaagattcagaacaacactggtgcccttgatccgaaactgttcattgcgtccgttttccggattaaacttccggagcatctcattaaaatgctccgccttaaagcctgcggtacgaattcccgcataggcagccagaatattatacacattatagaatcccttataattggccacgatccgtttatcctccactgtaaaggcaatctgatcatccaccttcacatctgtggcatcaaagtcgatctccggacgtttaaagccgcatttcggacatctgtagtctcccagctgactgtaatgatagaagctgtagatcagcctttctccacagcacttacagaaccggccctcacggatctcgtttgttttgttctcgatcaccggtttgctgatcccgtaggttacaaaaggatttccgcagtccatggcaagatatgcagacagtgcatcatcaccattgacaatgaccttcatatccggaacctttttcatcatttcttccaggatgttcatagtgatatcgatctcgccataacggtccagctgatcacggaacagattggtcataaccatataatccggtctgatccttgtgaacacatgtcttgtggatgcctcatccacctcgatacaggcataatccgcatccagttttccgctgaattttgcccccaatacaaaggctgccacaactccgttgagcatgtttgaaccggtatgattgcagatgaccttttttccctctgcctcaaggcctgcgcacagcatgttattggttgtggtctttccgtttgttccgcatactacaaatattttttctcttacctgagaagaaagctcttccaggatatccggacagatcttcatcgcgaccttaccggcccaggtcacaccctgccggcccataagcttacagacatgtcctgtgatctttgctgccatcacagcaatggttgttcttattttcataatcttctgattcctttgtttttatttctcttaccacagatcttccgctgtcaggaaatcggtacagattccttctgctccctgcgaaatgtatcttctggcctggtcacggtcattaaccgtataaacatacagactgatcccgtttttttcaaagatcttctccgtttcttctgaccaatactcccagtatactgttgctgccggaatttccttttctttacagaaggatgcaatatactccagctcttccacagaatactcctgccacagtgaatatacataggaaggaaaagaatagagcatggccgttccgggaaacattgcttcattgtagatttccggaatgatccgatccagcgtctcaccggcacctgcattcctggcaatttccacataatcactgtaatcctccagtgttctctgataattgcgaagagaatactgtttggaatcgatcagcacatatgcatccggataatctttcagaagaaggaaaaaatcctccagtgtcatgggggtgtatttcccatatattttactttgtctgaattccttttctgtaaggactttttttccgttgccatcccactgtcccatgggatcgttccagttatgcctgcagacccatactccatcggatgtcctggaaagatccaattcaaaaagacgaactccctgttcatacatgaacagaaatccctctctggaattcaggtaatcctttccgtccatacctcccagagcatgtgcaatggtcctgtagtccttccagctaaatcctcctgatgtattccgggcagtttctgtttccggaaaacttcctcccagaagaaaaagtgatacaaacagtatttccaatgtcagtataaaacgtcgcatcatctcaggcaacaaaaaaatgcacaagacgtaaaggaaaacatttcctcgctgctttcctttttatcttctgcaaatttatcatatccgggaacctgtcccaaatcattcctatattgtttctgtccggtaataccaaaagtcccaccgaccatgtttatcatcctttcgcatacgtgtagtcgtatttcatacattaccgattgtacgctaaaaaaggataataatcaagttaatcctcttcttcctcgtcatattcctgctgaagcctcagatattcatcatatttctcgtgtgcattccgattataggatcgggagatcggtattacatgctctccgatatggaagctgtcattttcagctcctgtgacccgttccatatttactataaagctctgatgacaccgcaaaaatgtaccgtcgtcaagctgtttttcgaagtctttcagcttacctctgcactggagtatacttccgtctgtcctatggaaattcacgatatggagactgctggtaatatagctaacctgactgtagcgtaaagtatacacacgggcacgatactgaaaatggatcacccgctcatcattcccgtcgctaagtcgcttcttcagtggttccattacatattccaaagtttcttcggttacaggtttcagtaaatagttatatgcaaacaggtcaaaagcatttctgtaatattcatcgcttctactcataaaaagcactgccactgacatttctttttcacgtatcttccgtattgtttccagtccgtctactttctttgaatcaatgttcacaaagattgcatcataaggtttccttttcttttccaattcttccaataaaagctcgccgcttttaaatatccgaatttctgaccctggaacgatccgctcaagctgtttgtgaagttttctcgcatccgtctgcatatcatcacaaatggcaatggtcatcatcgtcatatttatgtatccccttttactccatcattgttactttttgttctatatattataccatgatttgttattcaaattatgatatcttaatgtaatttatggtcgaaaacccaccatttatgcattttttcgagtttttggaatattaaaaaaggacatctgcatttctgcaaatgtcctttaaatcggtcagaagtaaattatacaagctcgataagaacttccattgctgcatcgcctttacgctgtccgatcttaacgattcttgtgtaaccaccgttacgatctgcgtatttcggagcaatctcgctgaacatcttgtcaaccatgtcaacttcttttgtatttttctttctgccagcgcccttagcaggaacctctgttacaggatagaaaactttcatcatctcacgacgtgcatgaagtctggaaggagcatctttcttgatctctttctgaacttcatcgtaaactgttttctttttgccgtctacgacttcttttacacgttttccgtcagcatctttacgagcaaccttagctgttactgtaactgtctcgaaattgtctttctcacgtacagccatagcgataagtccctcagcgatcttacggatctctttagccttagcttctgttgtcacgatctttccgtgatgaagaaggtttgtaacctgatttctgagaagtgcttttctctggttagatgttctgcttaattttctatattttgccattttattatcctccatctgtgggacaccaggacatgcttgttcggtcttactgtcctgctgctgacaccccactcattactctgtttccggattattcctctgtaggctggagctgaagtcccagctctttgagttttgcaagtacttcctctaaggatttgcggcccagattacgaaccttcatcatatcgtcagaagtcttgttgcataattcttcaaccgtattgataccggctctcttaaggcagttgtaggaacgaacagagagctcaagctcatcaatgctcatctccagaaccttttccttctcattgtcttctttctcgatcataacctctgcggtcttagcattctcggaaagatcaatgaacaggtttaaatgctcgctgagaacctttgctgcaaggctgactgcctcatccggatcaagtgttccattggtatatacatccagtgtaagcttgtcgaagtcagttacctgaccaactcgtgtattctctacgatcatgttgactctgtctaccggtgtgtagatcgcatccactgcgatcataccgatcggcatgtcatcggttttgcctttgtctgcactgatatagccacgtcccttggtaatggtaagctccatggccagtctgcagtcttttccaccgttcagggttgcgatcacctgatccgggttcatgatctcaatatcctgatctgcctggatatcagctgctgtaacaacacctttgccctcacactcaatgtatgcggtcttcggctcattgtcactgctgtgattcttaatggcaagagatttcagattcatgatgatttcggtcacatcttccttcacgcccggaatggagctgaattcatgaagtacaccatcgatcttcacctggcttactgcagctcccggaagggaggacagcataattcttcttaaagaattgccaagggtagtaccataacctctttccagaggctctacaacgaatcttccaaacttcttatcttcggatatttcggttatttcgatttttggtttattgaaatcaaacactataaggttccctccttctgggttaatcaacattcgagggtattaccaatttttataactgtagacacagtaaacagttactaattatttagaatacagctcgacgataagcatctcgtttacaggaacatcgatctgctctcttgtaggaagctctttaactacacccttcaggttctcctgatcaacgtcgatccactccggaacaagtcttccgccagtgatctcaagaattcctttatatctctcagagcctttgctcttctctctgatctcaattgtgtctcctgctttgcacaggtaggacggaatgtttacacattttccgttaacaagtacgtgcttgtgatctacgatctgacgagcctctcttcttgttctggcaaatcccatacggaaaacgatgttgtcaagtctgctctcaagcataaccataaggttctcacctgtctggccctgcattctgtcggctttcttgtagtagttacggaaaggtttctcaagaactccgtagataaattttgctttctgtttctcttttaactgaagaccatactcagacaccttgcggtttgcacgttttaactgtcttgtggacttcttatcaattcctaagtaaatcggatccaggccaagggatctgcatcttttcagaacaggtactctatttactgccatttcaactacctcctaattagactcttctgcgttttggtggacggcatccgttgtgaggaaccggagttacgtcacgaatgctggttacttcaagtccgcatgcctgaagcgcacggattgcagcttcacggcctgagcccgggccttttaccataacgtctactgtttttaatccatgaattaaagcagcctttgttgcagtctctgctgccatctgtgctgcataaggggtagatttccttgaacctttaaatccaagaccaccggcacttgcccatgaaagagcgtttccttcgttatctgtcagtgtgacgattgtattgttgaaggaagactgaatgtgtgcctgtccgtgttcaacgtttttcttgacacgacgttttgtcgttttctttgtaacttttgccattttaaaactaacctacactttccttttattgaaattaattagttatatctataaattatttcttcttgtttgcaacagttctcttcggtcccttgcgagttctcgcatttgtcttagtcttctgaccacgaaccgggagtcctttacgatgacggatacctctgtagcatccaatctcctgcagtctcttgatgttaagggcgatttcccttctcagatcaccttctactgtcattgtctcatcaataacagcactcagtctcttaacctcgtcatcagtcagatctctgacacgtgtgtcaggattaacctctgctttagcaagaattttgtctgcgcttggtctaccaattccataaatgtaggtaagaccgatttcaatacgtttctctcttggtaagtctacaccagctatacgagccatgtactgtttcctccattttctgtttctgaaagttccgcatatcgtatgtcacttgctctcgcaaggtgaaatgggacatatcgacctgcctctttcttttctagtttcctaattggggtgcctcggtaaaacacccagctgtaattggcgaatcacagcctttccgaaattgcggatcttaaccgctgttgcctctcggtattaggcaatacatgcttattatctgttcagtagaacaaccctgccgggtgtttcatactgcagccgcacgtttcacaaacattccaaagaagttccgatatgaaaatcaaccctgacgctgtttgtgcttcgggttctcacagatgattctgatggatccctttctcttaatgaccttgcacttctcgcagatcggctttacagatgatcttactttcactggaaatcctccttccgtaaattagtctcatatctgcagtttcacaggcgcactcatacacagtatttgcgcgcttgaaatatatactaacacctgttttcctgaaatgcaagaaaaaatttaaaaaatttttgattttttttacaggctgtattataatgggtggcaaagtccggcagacatatggaatctgcctattttaatgaaaggaatctttacatatgcatacggaaatgaaatatcgttttctgatacattacaccttatcttttatcggtggatacctggggctttatgccattgtgtcaagagctgatctcttcggcaatgcccagacagccaatcttcttggtgttgtgcgggatctcataggcagggatttttcggatatgcttctgcgtgtgggtgcgcttctcatatatatggctgctgttatccttacggtctggatcccagagcatttttccgcagatcttcgttttatcagtatcgggatcgatatctttgcgatcctgctcctgggattctttccttccggaatgtctccggttgtggctctttaccccgtgttctttgcaatgcctttccagtggtgtaccttcaaggctcccggcggatataacagctccacgatcttttccaccaacaaccttcgccagttcaccacagctgtcactcagttccttatgaaaaaggacagcgcacagtgcgataaagcaaaattctacggaatgacgctgctttcttttcatacaggtgcagctttgtctctgatcctgtatatgacctgcggtctctcaggcgtatggctctgtctggttcctgccttctatgctgtatggctgatcagtgcagaccggaataccgcagccgatacatcggcagttacccgaagcacagcttctgacggcagcagcttcaggaatctttcctataagaaaaaagaggcctgactttattttagctttgataaaataagaggaaatgtgatctgtttttacactgtcacatttccttttttgtttacgcgtaagcccctctggcgcttacagcttatatgcgttcgaaatccagtatcatgattttgaatggccacaaattgatttcatctatatttctcatactatcctcataacatatcaatatactctgtaacttgtttaaacattccacggtatttacattgcgcttaccgggaaaatcttttataattattccagaaatcataaatcctgctatatatttttgaccgaacatgaatggagaattgaaatgcccaaaagtatttacgaagatatctataaagatctgaaaatgaaaatagaggacaacacctttgcctatcaggagcttctgccttccgaaaacactctgatccagacttacagctgctcccgcaatactctgcgacgtgcggtcagtcttcttgtcagtgacggctatgtacagaccatgcagggaaaaggtgtccgcaatatctaccgtccaaacgagaagactgctttcaccatcggagagatcgaaaccttcaaggaatctgctgcaaggaacggtcagaatgcccatacggaggtggctctttttacagagctttgtatcagcaaaaatcagtcagcttacacaggatttcccgctggtgcagaagtatattatattcagcgtatccattatcttgaagatatcccgctgatcatcaaccataattattttctgaaggaatccgttcccggccttactgccgagattgccagtcattctatctatgaatatctggaacaggtgcttcatatgaccattgtcaacagcaaacgtatcatgactgtggaaaaggttacagaaattgatgaaaaatatcttcatctgaatgtaaaggattataactgcgtggctgtggtgtccagccagacttataacagtgacggtgtgatgtttgagtatacccagtcacggcacagaccggatcattttcgattttatgataatgccctgcgccgatgagccaggctcataactgcttcgcagctatacggttatgagcaggtgacaaatgtggctcacaaatatccgcctagatctgtatagatgctgcagtttcctattttccaaaattatgttatactgaaacgatcaacggagagaggaaattttatttttatgaaaaaacgagaatcttttaacagccgctgggggttcattctggcctgcatcgggtctgcggttggaatgggaaatatctggatgtttcccaccagagtttccctgtatggcgggggatcgttcctgatcccgtattttatttttgtggcactgatcggctttaccggggtgatcggtgagatgagttttggccgcgggacacgttccgggcccattgacgccttcggcatggcctgtgaaaccagaggcaggcgaaggctgggtgaaacactgggctggataccggtgatcggtgcactggccatggctatcggttataccgttgttatgggatggatcttccgatatatgctcggaacctttacaggatctaccctggcaccggcagatattgagtcctttggcgccaaattcggaggcatggcttctgcctggggaaataatctctggcagctggctgctcttgtgatctgcatgtttatcctgatgtacggcgttggaagcggcatcgaaaaggccaataaagtgatgatgcctatcttctttatactgtttgtgatccttggcatctatgttgcctttcagccgggagctgctgccggataccgctatatcttccgcgtggagccggaagttctggcaaagccttccacctggatcttcgcacttggacaggcatttttctccctgtctgttgcaggcaacggtacactaatctacggatcttatcttccggacagcgaatatatccctgcatctgctgcaagggtagcactttttgatactctggctgctatgctggcagcacttgttatcattccggccatggctaccacaggtgccaagcttgaccagggcggtcccggacttctgttcatctacctgccgcacctgatcaaaaccatgcctggcggacggatcattgccatcatctttttcgtagctgtgttccttgcaggcatgacctcgcttatgaacctttatgaagctcctattgccacagttcaggaaaaaacaggtcttggccggattccttcctgcatggtgatctcagtgatcggcgttgtggtttcgcttcttatccagggcattgtttctgactggatggatgtgctttccatctatatctgtcctctcggcgcaggacttgcagggatcatgttcttctggatcttcggccggagctatgtggaaagccaggtcaacaaaggccgcgagaaaccattcacgaaatatttttacccggtgtgtaaatatctttatattccggtgtgctttctggtgctgatccttggtgttgtgctgggcgggatcggatgataaggtgataacataagtaaaataaaaaattatctgcataaataaatcccccgaaaaatgattttttaatcatttccgagggatttttatgttttatcttataatattcgtacagccaggattttcgatttgctgcatatcctgaatacactcacttcacagtttgtcaacaagtttaagttttacaccgatttccaattattctacattcttagagtgtatccggtttctccacttcatagtcagactaggaagcaattgtatcgcagcctgagaaacgtaaaaaaatgtgagtgataaactccacttcaaattctttttctgcagaaaaggcaaaaaaagacccggcagcttaacgccaccaggtcgtcttttacaatatttcttatttatctctccagatgattcttcctttggaaagatcatacggagaaagttcgatcgttactttatctcccgggagaatacggataaaattcatacggagcttgccactgatatgtgcaagtaccacatgtttgttttccagttccactttaaacatcgcattaggcagtttctccagaacagtgccttctacttcgatcacatctgcttttgacattttttacctcctatgtcatgacaacaattgctgcttacagattcgtaagcgtcagaatctctggttccccatcggtgatgaggatcgtgttttcataatgggcggaaagtgaaccatccatggttaccactgtccactcatcgtccagccatgccacgtccgcacgaccaaggttgatcatgggctcgacggccagggtcattcccggaaggagcttgatgcccctgcgcttctgcgggaagtttggaatctgcggatcctcatgaagatgagttccgattccatgtcctacaaggtcacgtacaataccataacggtatttcgctgcgtgggctccgatggctttggaaatatcatttaaatgatttccggcttttgccattttcagtccttcaaaaaagcactctcttgtaaccttaatgagctgctgtgcttctttggatacttcacctaccgcataggtacgtgctgcgtcagaatggtagcccttataaatcaggccggcgtcgatcttaaccagatccccgtcctggatgatcttctcctcggatggaattccatgcacaacctcatcattcaggctgatgcagaaagaagccggaaaacctccgtagttcagaaagttcggaatacagcccatagaccggatcatttcttctccgatcttatcaatctctttggtgctgacacccggtttgatgtaagggatcaaaccgtcatgcaccttctcaagaagatggcctgcttctctcataagttcgatttcatgctgtgtcttaattgttacggacattcttattctcctaagatgtcaacgatctcctggaatacctcattcagatccctggttccgtctaccgtcttcaaaacaccctgtgtggtgtaatagtcaatcaatggctgtgtctgctcatgataaacattcagacgcttctgaactgtttccggcttgtcatcatcacggagtacaagcttgtcaccacaggtatcgcagaccccctctgtcttcggtgctgcaaatacaacgtgataagttgcaccacatttcacacatgcacggcgtccgcccatacgtttcacgatgttatcatccggcacatccacatcgatcgcatagtcaattttgcttccaagtttgttcagagcctctgtcagacattctgcctgcggaattgttctcgggaaaccatccagaacatacccttcccttgcgtcatcctgctggattctgtcaacaacaaggtcgcaggtcagttcatccggaacaagaagtccctgatccatgtaagtttttgctttgtttccaagctcggtaccgtttttgatgttagcacggaaaatatctcctgtggagatgtgcggaatcccatatttcgccgcaattttcttagcttgagtacctttacctgcccccggtgcacccaacataataattctcatagcataccctccattttcctgttttctgcctgattttcagacagtcctgtttacaaatcaaggctgcgacactttcgcaccgcaaccttcattttcaattagttcaggaagcctttgtaattacgtacaagcagctgagattccacctgcttaacggtctccaggataacacctacgatgatgatgatagatgtaccgccgaaggaaacatccgcaccgaacacaccgttgaagaagaacggtataacggccacgataacaagacctactgcacctataaatataatataattcaggattttagtcaaataatctgaagtcggttttcccggacggatgcctgggataaaaccgccctgctttttgatattatcggctacttccaacggattaaaggtaattgatgtatagaagtatgcgaagaatacgcaaagtaccacatacacgatcagaccccagctgtactggatctgacttggattacaccagttattggaggaaagtcctcttaagatctcacttccgatgcccgttccgtttcctttgccagcgaactgagcaatgatcgacgggaaagacatgatagaggaagcaaaaataaccgggataacgccggcagtatttaccttgagcgggatgtttgtggactgaccgcccatcattttacgtccaaccatctttctggaatactgaaccggaattcttctctctgctccgttgaggataagtacgagcactacaacaaacagaataatcacagcaatgatgcaggctgcaagcattccttttgcaattgttttgcccttgacgaagttctcataaagaagggacatatcactcgggatcctggacacgatattgatagtcaggacgatggaaataccatttccaatgcccttctctgtaatacgctcgcccagccacataagcattgcggaacccgctgttaaacttgcaacaactacgattcctttaaggaagctcatgttcgggatcataccctgacgtccaaatccgattgccatggcaacagactcaaacagagcaagaccaaccgttacataacgtgtgattgctgtaagcttttttcttccttcttctccgtcacgctgcatctcttccagtgccggaatggcaatggtaagaagctgaatgataatggaagaagtaatgtaaggtgtgatgttcaatgcgaaaattgacatctgagtaaaggaaccgccggtgaacgcatcaaagaaattgaatgcgtcaccggtattagattcaaaccactgcttaaagaagtcactgtcgactcccggtacaggaagctgggatccgattctgatcacgaatatcatccagatcagatagagaagctttcttctcatttcctttactttgaaaacactcttaagagtctcaaacattagatcacctctactgtaccaccagcagcttcaatttttgtttttgcagtctcgctgacagcgtttactttaacattaagtttttttgtaagctcgccgtttccaaggatcttaacaccatcaccgatcttggagattgcaccgcttgcaagtaagctgtcaactgtaacctctgcgccatcctcaaaacgattgagaacgtctacattgattgcgataatttctttagagtttctgttagtgaaacctctcttaggaagacgtctgtataaaggcatctgacctccctcgaatcccggtttcttatgtccggaacgagcaagctgtcctttatgtcctttaccagcagttttgccgtttcctgaaccatgtccacggcctcttctgaagttatcgctatgcttggaaccctctgcgggtcttaagtttgataattccattctggcacctccttaatcttctacttttaccaggtgctgcacctgctgaatcattcctctggttgcagcgttgtctggcatctcaactgttttatgcatctttgtaagacccatagcttttacagtttttttgtgtttcggtactgcaccgattggagattttaccagtgtaaccttgattgtatctgccatttccatatcctccttaacccagaatctcatctacagattttccgcggagctttgcaacctcttccggagtctttaactggctcaggcctgcgattgttgccagaactacgttctgtttatttctggaacccatacattttgtacggatgtttttgatacctgcaagctcgattacggcacgtgccgggccaccggcgataactccagtaccttccggagctctcttcagaagcatctcagcgcttccgaattttccgatgaagtcatgtgtaatggaattgttctcgtctcttgcaacagtaacaagcttcttcatagcgtcctctttacctttgcggatcgcctccggaatttctgctgcttttcctaaacctgcaccaacgtgtccattgccgtcacctacaacaactaaagctgtgaaacggaagttacgaccacctttaacaaccttggtaacacgcttgattgatactactttatcttctaactctaactgactagcatcaataagattacgtttcatgtgttcttttcctcctcttagaatttcagtccagcttctcttgctgcatctgccagtgctttaacttttccgtggtagatatatccacctctgtcgaaaacaacgctctcgataccagcctcaacagctttcttaccgatcactgttccaacttttgctgcagcctgtacatcatcagtgttctcaagctctgcttttacgtccttctggagagtagaagcggatactaaagttttaccaactgtgtcatcaataatctgtgcatagatgtgcttgttggaacgaaatactgccagacgaggagtagttgcagttccgtttaaatgatgacgtaatcttctatgcttcttttcgcgaatttcgcttctggatgctttgttaatcatattctcactctccttaattatttcttaccggtcttaccgactttacgtctgataacttcgtcaacgtacttgattcccttgcccttgtatggctcaggtcttctcttgtctctgatctcagctgcgtactggccaactttttctttgctgataccagatacgatgatcttgtttccgtcaactgtggactcaagaccttctggatcttccatctctaccgggtgagaatatccgaggttaagtacaagtttcttcccctgcttagcagctctgtaaccaacaccgttaacctcaagctcttttttgtatccttcgcttacaccaacaaccatgttgtggataaggcttcttgttaagccgtgaagggctttgattctctttaagtcgttcggtcttgttacaactacatgaccgtcttcaactttgatctctaactctgtcgggagtgctctctcaagtgttcccttaggtccttttactgttacaacgtttccatctgcgactgtaacctcaacgccagctggaattgcaaccggaagtcttccgattcgtgacataaatttgtcctccttacttagattgtcggagagggcccatgccctctctgttttcagtttaaaagctatatgactgcttcgttaagcggctttggcctaccaaacgaatgcaagtacctcgccaccaacctgaagcttacgagcctctttgtcagtgataacgcctttgtttgtggaaaggattgcgataccaagtccaccaagaaccttcggaagctcatccttgcctgcgtatacacgaagacctggtttggagattctcttaagtcctgtgatgatcttctggtttttgtcctcaccatatttcagtgtgatgtgaagagttttaacaactccatcctcaaccagatcatattttgcgatgtatccctcatctacaaggatgtttgcgatagcaattttcatcttggatgccggtacgtctacagtgtcatgttttgcagtatttgcgttacggattcttgtaagcatatctgcgatcggatcgctcattgtcatgtaagtttcctcctctttcttcagactttacatgtcgtgtgaatattatttaaatgattaaaaagttgctttcgcctcggcctaccaggaagctttcttaacacccgggatctgacctttgtatgccagctcacggaagcagattctgcaaattccgtattttctcaggtatgcatgtggacggccacagattctgcagcgagtatactctcttgtggagaatttagctttacgctgctgtttaattttcattgctgtcttagccatgaatcttttcctcctatttagcaaatggcatgttgaataatgtcagtaattcgcgtgcctcttcatctgttttagcagttgtaacgaagataacgtccattcctcttactttatcaaccttatcgtactcaacctctgggaagatcagctgctctttgataccaagagcatagtttcctctgccgtcgaatgcgttcgggttaacaccacggaagtcacgtacacgtggaagagcaaggttgataagacgatcagcgaactcatacatcttctcgcctctcagagtaactttacatccgatcggcataccctctctgattttgaagttagcgacagattttttagcttttgtagcgattgctttctgtcctgtaacaagttccatatctgcaattgcagcgtcaagaagtttagcgttctcttttgcctcgccaacacccatgttaacaacgattttctcgagttttggcacttccattacgtttttgtatccgaatttcttggtcatggcatccatgatctcgttcttgtaaagatcttttaatctactcacctttatatgcctcctctcttaattaatcgattgtctttcctgttgctttggcaacacgaacttttttgtctccatccatcttgaatccaactcttgtagcttttccgtctacaacgagcattacgttggagatatgaagcggagcttcttttgtcacgattccaccgttctgattagctgcggacggtttagcgtgctttgtaaccatgtttacgttctcaacaactactgtgttgtcttttacgttaactgcaaggacctttccgtccttacctttatcttttccagcgattacctttacagtatcaccttttttaattttcatagctgacattcggcaccctcctataatacttccggagctaaggaaacgatcttcatgaatttcttctcacgaagctctctggcaactggtccaaagatacgtgttcctctcggagttaagtcatccttgataattacggcagcattttcatcgaaacggatgtaagatccgtctttacgacgagcgccttttttagttctaacaactacagctttaacaacgtcaccttttttaacaacgccgcctggtgttgcatctttaaccgtagcaacgattgtgtcaccgatgtttgcatatcttcttgtagagccgcccataacacgaatacaaaggatttcttttgcaccagtgttgtcggcaactttcagtctagtttcctgctgaatcatactggtttcctccttatttagctttctctacgatctcaaccagtctccatctcttgtccttggacagcggtctggtctccattaccttaacggtatctccgatgttgcactcattgttctcgtcatgagcttttaatttatatgttctcttcacgatttttttgtaaagaggatgttttacatggtcttcaattgcaactacgatggtcttatccattttgtcgctgataaccttacccacgcgggtttttctcagatttctttccacgatttatgtcctcctgtcctatttggaagcgtttgcctgctcagtgattactgtctggattctggcaatatttttacgaacctctttgattcgtcctgtattgtctaactggtttgttgcattctgaaatctcagattgaaaagctcttttttagcagctactaattcttcattcagttctgcaactgactttgcttttaaatcttccacgaacttattaattttcactgttatcaccgccttctaagtctgcacgagaaacgattttacatttacatggtaacttgtgcattgcaagacgtaatgcttcacgggcaacctcttcggacacgcctgcaatctcaaacataacacgacctggttttactactgctacccagtactccagagcgccttttccggaacccattcgagtctcagctggtttagctgttaccggtttatccgggaaaatcttaatccaaactttaccgccacgtttgatgtaacgggtcatagcaacacgggctgcctcgatctgattagatctgatccaacatggctcagtagcaacaagaccgaaatcaccatagttgataacattgcctctaagggcttttcctctcatggagccacggaattgtttacgacgttttactctttttggcattaacattatttatcgctcccttccttagttccttttgtcggaagaatctcaccattgtagatccatgccttaacaccaactttaccatatgtggtgtctgcttccgcaaagccatagtcgatatctgcacgaagtgtctgaagcgggattgttccctcgctgtagaactctgtacgagccatatcagctccgccgagacgtccggatacggaagtcttgattcccttagcgccagccttcattgttctctgcattgtggacttcatagcacgtctgaaggaaatacggttctcaagctgaagagcaatgttctcagcaaccagctgtgcatctttgtccggtctcttaacttctttgatgtcaacgataagcttcttgtctgtgtatttctgaagctcagctttaactttctcgatctctgcgccgcccttaccgattacgataccaggttttgctgtgtagatgatgatcttaactctgtcagatgctctctcgatctcgattttggaaacacctgcgctgtataatttctttttaaggaatgttctgatgttgtagtcttctaccaggtagtcagcaaacttgtcttctgcataccatctggaatcccaatccttgataactccgactctaaggccatgcggattaactttctgtcccatgcttttcctccttacctttcatcaagcacaactgtgatatggctagttctcttctcgattctgtaagctctaccctgtgctctcggctgaattctcttcattgtaggtcccttatctgcatagcatgctgcaacataaaggttgtctgcgttcattccgttgttgttctcagcgtttgctactgctgactcaagcagttttttgatcacgctggaagcgtatctcggattgtatgtcaggataccaagtgctgtctgtacatctttgccacggatcgcatctaatacgtagcaggctttctgaacagaaattcttgcataagataactttgcagacggccttgtctctctattattctcatttctggctctctttatctggcttctatgtccttttgccatcttaaagtgcctcctttcttaaattcgatatctaagttatctgccagctgtcttaaattgacagcgggcagttataaatctgatgactagcgtactccggacttcttctcgtcttttccgtgtcctctgtaagttcttgttgcaacgaactcaccaagtttgtgtcctaccatatcctctgtgatatataccggcacatgttttcttccgtcatgaacagcgattgtgtgtcctacgaaagacgggaagattgtggaacggcgagaccaagttttgattacggatttatcatttgcagcgttaagagcgtctacttttttaagtaagctctggtctgcaaaaggtccttttttcagtgaacgagacatgctttctcctccttattatttcgataatgcttttccatcgcgtcttcttacgatgtacttgttggactgtttgtttttctttctggtcttcaggccgagagcaggtttgccccacggtgtgcaaggacctgggcgtccgataccggtcttaccttcaccaccaccatgtggatggtcattcgggttcattacggaaccacgaactgtaggtctgatacccatgttacgtttacgtccggctttaccgatgttaataaggttgtgatctccgtttccgattacaccaacagttgcgcggcatacgatcggaaccattctcatctcaccggaaggaagacgaagtgttgcgtactttccttctttagccatgagctgtgcgccgtttcctgcagaacgaaccatctgtccgccttttccaggatgaagctcaatgttgtgaaccatagtaccaaccgggataagctccagcgggaggcagtttccaacacgaacctcagcttccggaccattgtaaaccttctggcctactttaagtccctctggagcgaggatgtaagctttctcgccatctgcgtagcagataagagcgatgttagctgttctgttcggatcgtactcgattgttttaactgttgcagggattccatcttttcttctcttgaagtcgatgattctgtattttcttctgcttccgccaccctgatgtcttacagtgatcttaccctgattgttacgtccggcgttcttcttaagggaagtaacgagggatttctctggttttgcagctgtaatctcagagaagtcggaaccagtcatatgtcttcttgacggtgtatatgggttatagcttttgattcccatgatgtttctcctttcgaatttgttctcgtgctttcgtgcacatattcggacttatctgttaattaaagtccctcaaaaatctcgatatctttgctctcttctgtaagagctacgatagcttttttagtcttagcagtttttccaactaccattccacggcgttttttctttccatcactgttgatggtgtttacgctcttaacttttgttccctcgaacatcttctcaacagcctctttgatctgagtcttgttagcttccggatgtacaaggaatgtatatttcttctcacccatgtctgccatggatttctctgtgataaccggacggatgattacgtcatagtactgaatacttgccattatgcgtatacctcctcgatagatgcaacggcatcctttgtaacaactacggtgttgtgtttcataacatcgtatgtgttgattgtagccggtgttgcagtttccacgtcagcgatgtttcttgcggaaagaactacgttctgatcgttgtcagctgtgattacaagagctttctctgctttcaggtttgtaagaaccttctgcatctcttttgtcttaacctcagcaagtgcaaggctgtcaacaacaacaagtttattatcctgaaccttggatgtcagagcggatttaagagctgctcttctttccttcttgttcattttcacttcataatctctcggaaccggagcgaatacaacaccgccgcctgtccactgtggtgcacggatggaaccctgtcttgcatgacctgttcctttctgtctccacggttttcttccgccgcctcttacctcagaacgagttttcgctttctgagttccctgacggttatttgcaagctgacgaacaactgcaagatgaacgagatgctcgttgatctcaacgccgaatactgcgtcattcagctccattgtgccaacttcattgccttccatattataaacagttacattagccattctgatgctcctcctttcctattataaggactttactgtctctttgattgtaaccaaagatttcttaggtcctggaacagcacccttaactaacagtaagttattttctgtatctacacgtacgatctcaagattctgaacagttacctgaacatgtcccatgtgacctggcatatgttttcctttgaaaaccttgctcggatcggagcaagcgccgttggaacctgcatgacgatgatatttagaaccgtgagccataggtcctctggactggccatgtctcttgatggcgccctggaagcctttacctttggaaactgcagtagcatcgatatgatctcctgctgcaaagatatcagccttgatctcctgtccaacctcatactcgccggcattgtcaaatctgaactcttttacaaatctctttacagctacaccagctttgtcaaagtggcctttctccggtttgttgaccagtttctctctgatctcgccgaagccaacctgaactgatgtgtatccatcgttctcctcagttttaacctgagttacaacgcaaggacctgcctgtaaaacagttaccggaattaacattccatcttcattgaagatctgagtcattccgactttagtagctaaaatagctttcttcatttctttcttcctccttatagcggattaccattcggtaatcatatagttaatgtcaaatgacattattagcggtttttcatcttgatatcgatgtgaacaccagccggcatttccagtctagaaagtgcatctactgttttctgagttggtgtcaggatatcgataagtctcttatgtgttctctgctcaaactgctctctggaatctttgtatttatgaacagctcttaagattgtaacaacctctttcttagtaggaagcggaaccggtccacttaccattgctccgttcttctttactgtctcgatgatttttgctgcagatgcatcaacgagctgatgatcatatgcctttaatgtgattctcattacctgatttgccataaaaaaagtctcctcctattcgtacttatatagcagtacgacaagcggcgactgtacacatctccgtgtgtgtcatggtatatttgcacacacgtcccatcccaagatggttattgaactttgtacagtgacttgtcgtcagtttcctaacttgacattcgctccacggaaaacctgccagtgtggcagcaacctcgcgcttcatagctatcaatgtcacagcaaggattagtatatacgatgattcttcagaatgcaagccttttttttaatttttttgatttttttttaaaaagaagaaaatggctcatttctgaaccattttcttcttatataataggtacttattttattcttccatatcgtccacatcaccactgatgatatccgagtaatcaaacagtgtaaccttcgtgatgtcatccttaacgatatccggtgcatcaccggccttctttacgcggcttgcaagctgcgctgcggaataagacggcatcgcaaggcttccaatggtaaccggctcctcttcctcttccggaacctcttcgacctttccggccggatgcggctttctgttttcttcaaccgtacgttctgccatttccagtctggaaagcatatctgcttcttctgaagtggctgctgcaatctctttcttaagttccgcatgagcctcacttgcggcagtctgtgcagtctgctgtatggcagccttctttttattctccgaatagcctgtaacatcctcttcgtcaatctcatctacgaaaccgcccgtacggaccttacgcttatctgcttttttatttttgtgttttcgtgccttttcttcctgaatgatctctttttcttcttccttcattcttctggcacgtgctttttcttcctgcttcaattctttcctagacttcacataacccggttccggatcgttcacatcttcctcaatatcatccggctctttcttccagagctctgcgatcacatacaggatgatcaggaacaatacgaccagaccaagaatgatcaggccttcaatactttctgtagccaccataagatatcccacatagccaatggtaactacaacttttggaacataatctccaaccttaatggtaaaagtctttcctccggaaacggactgatctgttactgttccggttcccttggaggcatcgagattggtgatcgtatatttatatgtctcggaatctttctgtacaaggatcggagtacctgcgctgatcgcagaactcttctccgggatcgcatatgtaacagatccgactgggaggttcgttgccttatcggatttatccacgatcactgttctcaccccgaagaacggcggaagaacaagtcccagtacacagatcagtgtgcatatcacaacaaaatgtacgataaatttcaatacttttgacataggtaatcttcctctttcatatttgtaggtactttgaagcggaaagggatacagcgggaatcggtcttcctttccgtctgtatccctttatattccacatccgcaggaatctacccttttccgcggactgctctgtcccaactgattactggttgcttaaatactgttcaatgctctccatcgctgcattctcatcatcaccgttggcagacagtgtaatctcttctccagcgtcaagtcccagggtcatcattcccataatgctctttgcattgactctttttttgccaatctcaacataaatttcactgttaaactggcttgccacctgaacaagctgtgctacaggtcttgcctccagtccagtggataagttgatagtgattggttttttaatcataatagctcctccttgttctcccgcagctcatctgcgatctcactcagcttgcgaagccggtgattcacacctgatttgcccacctgcggattcaacatcatacctaattctttcagtgtggcatccggatactgcagtctcagcctggctatctgtgccagtccatcgcttaagctctcaaagccgatagttctgctgatcagctgtatatcttccacctgtctcactgccgcatttaccgttttattgatattcgcagcctcacagttcaccttacggtttaccgtgttacgcatttccttaagtatccggatgttctccagatccataagggctacgttcgcctccatgactgccagcatgtcaacgatctgcgcgccttccttcacatagaccacatatgatttcttgcgcaccacaattttagcttctacgtgaaaactgcggataatcccctgtaattgttccgctttcctgctgtccggacacacgatctcaaaatgataccctttctctggatcactgatcgaaccggacgacaaaaaagtaccgcgaataaatgcccgcttgcaacagttcatctgaaccacaagcgaattatccatttcaagtaaaccggtttcgttatccacagaaagctttgtcccctgcagtacttcctctgttctggcaggatccgtaacctcaacaagatataccttaccccgtttgagatgagacccttcccggataacaatcgctgtctctatattaaaggtttttcgcaataatgtaaagctttttcttgcaactgcttcattttctgtctggatccatagttttctgtttccatccgacattttttccacacggccgcagccgcagagcagtgccgccagttctgccacctgacagtgcctggccagactaagctgtcctgcaagttcttctttgacttttcctgaaaatgacatcccgaaccctcttttactgtttccctgccacccttttcatcgcggcaattattttttcagaagtctgtccttctccgcatccctgtgctccaggcggataccgtattcatccgatttggaaagcctggaaaaaagttctctggcaatagtaacagaacgatgttttccccctgtacatccgataccgatcacaaggcttgttttcccctctttaatgtagttagggatcagaaagcggatcatatcctccagtttgtccgcgaaggctttcgccgtatcactggccatcacataattgaacacttcatcgtcaaggcctgtcagaggacgcagttcatccacataatagggattgggaagaaatcgcacatcaaacacaagatctgcatctgccgggattccatacttaaagccgaaggaaagcacagagatcatgatattgctgaactctctgtcgtccacaaagatcttttcgatttcctggcgaagctccctggtaagcagatggctggtatcaatgatataatccgcacgtttccggagaaattttgttttctcacgttccaggcggattccctcatccactctccctgctcttgccagcgggtggcttcttctggattctttatagcgttttacaaggaccgaatcctctgcatccataaacaggatctcgtaatcatacccggtctgcttcatacggtccagaactacttccagttcatcaagggcacttccgcttctggcatcgatccccagagccacatttctaacattttcgctctgcatctcaggaagaagggaagcaaatttttccagaagctggattggaagattatccacgcagaaatatcccatatcctccaacattttaagtgcagctgtttttcctgctcctgacactcctgtaacgatcacaaaacgcatagtctctcttcctttccatttcttcttccgttatctgcaaagcgtacatacgcattcctgttccctctgtttcgtatcctgggtacctggaagccggactacgctgagccttttaggtctgtgcgatcggatccacagacaagtaagtggtataattattttgaaaacgatgtaccagaaatggtcatcaggcttcaaaatcacccaggaacttcacctccggttccagcgtaactccatatttcttataaacgatatccctgacattatccatcagcgtgcggacatccctggcagttgcaccgcctgcattgatcacaaagccacagtgtttctcagaaacctgtgcaccacctacctgatatccagcaagaccgctgtccatgatcagcttacctgcaaaatatccctccggtctcttaaaggtacttccagcactgggatactccaacggctgtttggtggtacgacggatcgtcagatctttcatggtctcacggatcacttccggatttccctccttcagctgcaactttgcttccagcacgatataacctgcggttttgatgatgctggtacgatatcccagttccagtttatctgccggaagggtaacgatcgctccctcctcatccatcacagttacctctgtgagaacatccttcatctcgccgccataggcacctgcattcatcacaaccgcaccgcccatagttcccgggatcccgcctgcaaactcaaagcctgtaagagctgcattttttgctgctgctgccaccgatgaaagcagcgcacctgcctgtacggtgatctctgttccttctacggtaacggcagacatatttttgtagatctggataaccgcgccacggtaaccgccgtctcctaccagaagattacttccatttccgaggataaaataagggatcgcactttctttacagatttttacgatacgccccacatctgtgtctttatccggcatcagaaaataatccgccggacctccgatcttaaaagttgtatgacggctcattgcttcgcctgtaaaaacacgttcttctccaagaagatcgcagaacttttttatgatttctgaattcactttttatttcctcagtctttctgttttatttctgtaaagcagacattactgttccgccttgactcatgctcatgaactggatctgtccgtgatctgcgctcaatttctcatttgctgtcagctgtgtgaaacgtttccggctgacagtatatcccgcacaacttctcccgccagcagatatcccgcagtccctgtcacaaaggaaatatttccttcggcaggcttcttcaccatagttcttctccgtctgaaaagcttttcttttgccggttgttctctggaatacagtactttgagtttacgtattccctgtttacgcagttctttttttatgatcctggccgccgggcatactgtggtcctgctgatatccgcaacctcaagtctagacgggtctatcttgtccccgatgtccaggcaggagatcacaggcacacgttcctcccttgctctgctgatcagaagcagttttgacgacagtgttcccattgtatccacaatataatcaaaggaacgcaattcaaacattcccgcagtctcctcattataaaaggtttcgtaggtatgcaccaaaatattctcatcaatatcccggattctcttcttggccgcctctaccttgctcattcccagagtagaatgaagtgccagcacctggcttccgatattcgtcaatgtgatcttttcatgatcgaccagtgtcagactccccacaccgcagcgcgcaagtgactctgccacctgtgatccggctccgccaagaccgaatactgcaattttcgccctgctgagtttttttacacctgtatttccaacgagcaattccatacgtgaaaaagcatcctgcatatccgtcctcctgacactgttttttcttttgattgagaaagacagcgcctgtccgccgctgtccatattcctttttattatactatctctgtccgtaaatgtacagatattcttgttttttaagattttcgcataaaaaatttatattttctcatactattcccatacaatcccacaaggaggttctgtccatgcttcaacagctgattctgtgctttatcggtttctgtgccgggatcatcgttgcaggaggtgtctccggactgctgatcggcctttccattgttccccgctatgcaggtatcacgcatacagctgaccagatttttctttatgaagatctgacacttctgggaacagttgccggaaccgtcgtcaccctgtttccgatcagaattccgctgggaccttttttcctggctgtctgcggagtatttttcggaattttcctgggcggctggatccttgcactggcagagatcgcaaaagtctttcccgtctttgccagacggctgaagctctctcaggggctttctccggtaataatttccattgctgccggaaaagccctgggctccctgttttattatgccatgggctggatgtaattcttactgtcactctaccatctcacgaaaggattttccatatgcaaaatatcaacaaaaaaaaatatgaacaatatgtcaagcagcttactcccacccacagtctgccactgaatatggcaaaagcttttctcacaggcggactgatctgtcttcttggacaggttatcttaaacacagcacaggctctcggtgcagatgcttccgattccagaacctggtgttctgtcattctcattctcttaagcgtccttctcacaggctttggtatttatcccaaaatcggcaaattcggcggtgcaggaagtcttgttcccattaccggattcgccaactcagtggctgcatccgccattgagttccgggcagaaggacaggttttcggcatagggtgcaagatctttactattgcaggccctgtgatcctctacggcatcttaagcgcctggggactgggtgtaatctattatatcctaaagatcctggaggtgatatcatgagcaaaagtctcagacttggcgcagccagcattgcattttcacagcctttgtatatcgaaagcgccgcatccatcgtcagtcagaaagaggcggacggtcctcttggagatctttttgacctggtctgtaaagatcccatgtttggctgtgacacctgggaatctgcggaaagcacactgcagaaagaaactgccactcaggccataagcaaagccggactgagctccgaagatatccatctgatgttcgccggagatcttctcgctcagacatcagccacctgtttcggctccgctggacttggaattcccttttacggtctttacggcgcctgctccaccataggggaagcactttctctcggttcccttgctctgaccgccggattcggcacacgggtcttatgtgccacttccagccatttcgcaagtgcggaaaaagaatttcgttttcccctgggatacggaaaccagcggccgttttctgccacctggacagtaaccggaagcggtgcctgtatcctaagtacatctcctcccggagaaaaagctcctctgcgctccggcaaaggctgtgctgctatcaccggccttactgccggccgtgtgatggattacggtctcagggattccatgaacatgggaggctgtatggctcctgcggcctgcgataccattgcacgaagcttttcggatttcgggcggacgccttcggattatgatgccgtctttaccggggatctggggatcatcgggcagaaaattctcctggatcttctggaggaacaaaatatccggctttctcccattcataaagactgcggtatcctgatctatgacaatccttctcaggacacccacgcaggaggaagcggctgcggctgttctgctgtagtccttgcctcctacatccttccgaagattgtatccggagaatggaagcggatcctttttgtaccaacaggagcgcttctttccaaagtaagctttaatgaaggtgacagtattccgggtattgcccacggagttgtcatcgagcatatggaggtatgagcatggattactttaacgcattctggttcggcggccttgtctgtgccctgatccagatccttctggacaagacaaagctgatgcccggccgtgtgatggtacttctggtatgcagcggcgccctgttaagtgccgttggcgtctaccggccgctggtggattttgcaggtgccggggcctccgtcccgctgatcggtttcggacatgtattatgggagggtatgaaaaaagccattgaagaagacggcatccttgggctttttacaggaggcttcactgcctgtgctgccggagtttcctccgccctgatcttctcttatctggccagtctcttcttccgtccaaaaatgaaaaaataatattccgggaaaggagttttttctcatgagtgatactctttatctgcagctggatcagaacattgaagtcaccaacccacatgtatatcttcaggatatcgctgcactttccatgagtgaccccaaaatcctcaatcgtctgcgggtcatgcctgtgatcattctggatgcgaaaaagcccggacgctatgtgatgtctgtctcggatcttctgaaaaagatccagaagctggaaccctccattgatatttctcccatcggggaaacggattttatcatcacctaccgcatcagctctgccacagggaaaattttccggtatgtaaaaatcctttttgtatgcctggtttcctttttcggcgccgctttttccattatgacctttaataatgacgtagatatgggcagcctttttagccagttttacactcttgttacgggaaaaagttcctccggctttaccatcctggagatttcctactccatcgggatcggcctcggcgtactgatcttctttaatcatttcgggcagctgaagctaagcgatgatcccacacctatgcaggtgcagatgcggacctatgaggatgatgtaaaccggacactgatcgaacaggctgcacgaacagaaaatccagaaactgaatcataaccagagcccactctcatatccgtacaattccgccgcctgtcgcaccaaaaaagctccctgcagatttctctgcaaagagctttttttatataatatgggtttacttttttttctgaaatgatatttacagaagtcctccgatggataagaacagaggagcaaataccagtgatacaatagtcataagcttgatcaggatgttaatggaaggccctgatgtatctttgaacggatcgccgactgtatcgccgacaacggctgctttgtgcgcctcgctgccttttccgccatgatgacctgtctcgatgtattttttggcattatcccatgcaccacctgcgttggacatgaagatcgccatcagtacacctgttacaagagcaccggaaagaagtcctccaagagcctcaacgccaagaacaacacctacgataaccggaacaacgaccgccatgattccaggaagcatcatctcgtgaagagctgctgttgtggagatcgcaacgcatgatttgtaatccggtttctcggtacccttcatgatacccggtttctcacggaactggcgtcttacttcctcgatcatcttgtaagcagccttggaaacggattccattgtgaaggccgagaagaggaatgtaagcataccaccgataaagataccgatcgtaacacgaggagcaaggatattgatcgcatccagatttactgcattcgcataagatacaaacagagcaagcgctgtaagagctgcggaaccgatcgcaaagcctttacccatagctgctgttgtgttacctacagaatcaagcttatctgtgatctcacgaactgactcatccagacctgacatctctgcaataccaccggcattgtcagcgatgggtccatacgcgtcaacggcaactgtgattcctgttgtggaaagcataccaactgctgcaagagcgattccgtataatccatccacaccgtatgctacaaaaataccaacacagatcagcaggatcgggaatgctgtagatttcatacctactgcgataccactgatgatagttgtagctgcacctgtctcagactgctcgccgattccctgaaccggtttataatctgcagatgtgtaatactctgtaatgtttccgatgatgacaccgacaacaagacctgcgatcacagcgatggctgccttcatgtctccgaagagagtcttgctgaggatcagggacacgatgataacaagtgctgcagatacatagcttcctcttgtgagggctttctgcggattggaattatcatcaccttttacaaagaatgttgcaatgatggatgcgatcagtccacagcctgcaatagccagcggatagagaacaccggaaactgctccggctaccgcaccaagtgtaagggcagataccagagatcctacataggactcaaaaaggtctgcacccataccggcaacatcacctacgttatcacctacgttatccgcgataacagccgggttacgagggtcatcctccgggattcctgcctcaaccttacctacaaggtcagctcctacgtcagctgcctttgtatagattccaccaccaacacgtgcaaacagtgcgatggaagaagcaccaaggctgaatccggaaagtacgtcaacgttctttgtgatgatatacacaacgctgacacccagtgcaccaagacctgcaacacacatacccataacagcaccgccggagaatgcaatggaaagagccttgttcattcctccctcttttgctgcatttgctgttcttacattagcctttgttgcaacggtcataccgcagtatcctgcgattgttgaaaacagagcacctactacgaagcagattgctgttacccagcttccaactccgattccgatcagtacaaaaagtacggctacaaaaataaccaggatcttgtactctgctgttaagaaggcgcgggcaccttctgcgatcgcacctgcgatctccttcattctgtctgttcctgcatcctgcttgctgaccttcgctgcaaggtatgctgcgaacagaagtgccagtactgccgccaccggcaccaaatacatgtagttttccactctttttacctccgttcatgtattgttaatactttatcacattattttgcatatttcaaacagaattttcacttagttttttgttaatattgtgatataataaaattttatataaatgaaataaattttttttatattattgttcgcattttttcagtttcagacagcttatataataggaagtttttttatatctctatttggacaaaatttccatttttctttccagaagatttttttccaataattgtttttctgcattttcgaatccaattcgttctatagtctcggcaaaacgttctccctttaatccctggtccttaaaaagcaggattgccttctcaataacatccagtgcctcttcctctgacgtaaagatccggttcagggcctttccatgagaaattttctttccccagcgtccaccgatatagatcttgaatccgtagataccatccgggatagaatggaacggacattttcccacacaccttccgcagtgtctgcaaagttcctcatcaatgtgcagtttcccgtcaacgactttcgccactttgtttggacatgcagcttcaatggcacattttttacagcccttgcaggcctcgctgtcaaagtgcgggatcctctgtccgatgatccccacatcgttcagatttggtttcacacagttattcgggcatccgcctactgcgatcttaaatttatgcggcagtgcaacctgacggtagcctttatagaatctccggaaaatctcttctgaaattgcataggaatccagaagtccatactgacaggtggttcccttgcaggatactaccggtcggacctttgctcctgttcctcctgtctccagaccttccttcgcaataaattcctgaaactcttcgatcttttcgtaggggattccctggatctccacagagagcctggtcgtgtaggtaagatttccgttgccgaatttctctgctgcttccgccatacatctgtgctgtgccgctgtcacctttccgtttacagtgatcacccgtgcagaaaattcatcggttccccggttatttaaaaacccctgccccttcagtcttttctcttcctctttgcttacagttaatgctgacatatttcctcctcctggtctcaccggtattccgatactttcccatggtatcgttgccctgtattttgcaatgttgaaatcgttttcacgtacttcctactataccacttgaagatgtatttgagaaatgatattattttataaaaatgataggttttacctatataccaatttacaataaaaggagattccatatgaccatccgccatctcactgtttttgcggccgttgcggaacagggctccatgagtgctgctgccaaacatctttatctttcccagccaacagtcagtcaggccatccgtgagctggaagctcattataacggccttctctttgaacgtcttggaaaaaagctttatctcacagaacggggaaagcttcttcttccccatgcccgtgaaatgatccgccagtttcagcagctggaagagctgatgcagaaccagggacagtcttccaccctgaagcttggctccaccctcactgtgggaacctgcctgaccccatccattatcctggatctgcagaaaaaaatcccggaccttgacgtttactcctttgtcaccaacacgcaaaatatcgaacagaagcttctgcgttctgagctggacgctgctgtggtagaaggtgagattcattccccggaccttgtcgttcttcccatcatcgacgactgtctggtccttgccgccggaaaaaaacatccgttttaccgcagaggacgcatccatgtccaggagctgaacaaccagaaatttgcagtccgggaatatggaagcggtaccagacagctttttgaggattacacccttcgccatgatctgaagatccggactgcctgggaagccaacagtccgcgggcactgctgaacgcagtgctgtataaccagatgctctctgttatgtccatccgtcttatgcatcatgagatccgtcaccgttcagtccgggtcttctgcaacgaagcaggggaatggaaccggaaattcaagctggtctatcacaagaataagtttcttacccctgctatctttgagctggaaaagatccttcacacctatcagcagctggaactaccctctgtcatgggtgttctggaacaggaataagcaggggacttacctgatccagtaaaaaaacggccgcacatatcgctcttacgatatgtacagccgttttcgttttttatctcacccgacaaggtcggatctttttttgaaccggatatttagtttgattcgttgaacacgtttttatccagtgcaccgttctggtgtgcaacgatggttgtgcagactgcatcaccggtaatgttaaccgctgttctggtcatatccaggatacggtcaatacccatgatcagaccaattgcctcaaccggaagtcctacagagttaaataccatggtcagagtaacaagaccaacacttggtacaccggcagttcctacggaagcaagggttgcagttccgataactgtcacataatccatcggacttaagtggataccgaaggcctgtgccgcaaatactacggcaacaccctgcatgatagaggtaccgtccatgttgatggtagctccaagaggaatggtgaatgaagaaatcttcttggaaacacccacttttttggacagggtatcaatggacatcgggatcgtggcattggatgtagctgttgagaatgcaaatgccataaccgggaaaaatttcttgatgaattttatcggattcagtcctgtgaagatcttcagcaggatctggtatacgccgaagcactggattgccagtgcaaggagaacaccgatcatatattttgccagcgggataaatgcgctgaaaccgatgtttgcaaaggttctgctgataaggcagaatacaccgatcggtgcaagtgccatgatcatcatggtcatctccatcatgatgtcattgaactggctgaaaaagttcgctactgtctctgcgcgctctcccattttcgcaaggatcacacccacgatcagggcaaatacgataacctgaagcatggttccgcttgccagggaattgatcggattatccggaatgatattcaggatggtatccgtaagagaggtcgcctccatagtctccacagaggaagcggaggactgaatagagctcatatcaagtcccacacccggattgatcagattacctaccgtcagagcaaccgaaacagccagagctgtagtcgccagataaaataccagtgttctcacacctacggttccaagcttcttggtatcaccgatggacatacttccgcagacaagggaacagaataccaacggtacaaccagcattttcatcagacggataaatccctgtccgatcacataaaggattccctccacgatcacatctttcttgaagctgctgtcaggaaccaggtaacagagaatgattcccagtattgcacctgcgatcagcgccacaaagatcttcgtggtaaggcccattttctttttctgctgtgttttctcttttatatttttctctttcattctagtcctccgctctttcatccatatattctttcagcgatgctttccagtccggcatgtcatacacttcaataatacggaggataaaattatcaaggacggcatatggcggtctgacagaagaaagatctgactgctctgtcggcacggatctcagttcgatctcctttcctgcaaggcgaaggatctcggttgcaaactcataacggttgcatacaccgctgcaggttacgtgataagttccatattcgttggtatcgataagatacaggatcattcttgccagatccttggcgctggtcggtgatccgaactgatccgaagcaacggaaagcgcctggcctttttctgctgtctccagcacacggtttacaaaattgtttccgccttttccgtatacccagttgcttcggataatgaaatgtttgtgtgtaaactcttttacatagttctctccggctctcttggaacggccgtaaacagtcagcggattggtatcgtcaaactctgtatacggttttttgctctttccgtcgaaaacatcatctgtggaaagctggacgatctttgccccgcattttcttgccacgatgcttaagtttcttgctcccagtgcgttgacacggtatgcatgttccggattcttctcacactcatcggtatctgtgataccggtgcagttgatgatcacatccggacggttaatggaaccgaagttgatcacttcatctgtgtctgtgatatccagctcatcaagatctgtgttcagagtctcgatctgcattggatccagaacatcattcagtgcccgtccgatctgtccgttggcacctgcgatccatacttttaacatctttctacctccctggtgtaatatgtgtgatatataaaataaagagacattgatttagatcaaaaccaatgcccctttaacctatatactgtaatatattttatcaatatcacaaaaaactgtcaagaaaaaagcccctgtttccataaggttcctgctgctgatgttactgcccaccagcagtatttcctcaagatgtttttgtgaacagaatttacagaaatcctgaggatcgggagttccataactcccgattttgtattgtaaattctgtcccatgaattataatctaaacaggagatcatctaaaaacacatacaaaggagaaacttatgaaaaagctaaaaaaattaacatctctgctatttctgttctgctgtctttgcttctgtctgatcctgtttccacagacagcccaggcaggctctcttacgccaaccgcacaggacaatctcaatgtcaggttacgccgtacctctgatcttattcctgtttccggcggatacatgagggtcttccaccagaaaaattctgtcggcgttgaatattacgataatgatctgaagatcagaagcaagcgcaagatcaacatggagcttccactgtggggtggcttttatgccggatctgacggatattatctggtagaaggccagacaaacaacaaagaaaacgattccgctgaggtcatccgcgttatccgctacgatacaaactggaaccggaacggtgcagcagtaattaccagtaacccggagctttttggcggtgaggtccgcacgccctttgactatggctgtgtggaaatgacagaaagcaacggcaagctctatgttgttaccggtcacgaaggatatgtggatccctctgtcggtcagggacatcagggcttccttatggtcgagatcgaccaggcaaccatgaaaggaaagatcgtttcctgcgatctgtggcattcctttgcacagtatatcaaatcacaaggttcttatctctacgtactggagcagagtgagggttcacgatgtacaattctttccagatacgacagcactacacttgcctgcaccaccatagagcttttgccatacggaggctcacatacttctgtgtgggcactggcctgctacgcaagcgttgacggcatggctgtttcctctgacagtgtattatgcgttggcacttccatcgatcagtccaaatatgataaggtatctgaaaacacgcctcataacctttatctgtccgtcacaccaatgtctgacttttccgaaaaagcaaccactaccaggaagcttaccaactttacaggcggaggaaaaagctttgcgggcgtaaagatcaccaaaataaatgacaaccgttttatgatttcctgggaagaatacgtctccgacgataacaagaaaaactcttccgctaatgatccgctctcttccagcacccttcattatctttttgtggacggaaagggaaagagtctcagcaaagagtttacaacagctgctccgatttctgactgtcagcctgtggtaaaggattccagggtcgtttattatgcttcaaactccaacaccttgaacttttattccattaattccgacaacggaaaagctgacaaaaaaacttaccatatcgcaggtgacaacgcaacctggaatttcaaaaacggtatccttacgatctccggctacggaccactttctatttccacagaggaaaaccaccgatacccggtctcttcaacaaaaggctggtttatcttctccaacgattcctcctggaaagctatcaaaaaccagatcagaaaggtaataataaagcctgggatcacaagtatttccgaaagggcctttgtttgtcttcctgagctgaaagaagtggacatccagaaaggggtcacaaagatcggaaaagaagctttcgcctactgtgacaagctatccaggatcaacatacctgatactgttaaaagcattggaacggatgctgtgtggggcggctacgggtatgtcaactctcatgcatatttttgcaagatccatgctccgtacggctcttacgcagttacatatgccaagaaaaacaatatcagctatgcatgcaatatttccgatgcagctgtaacagggatcaaaaaaacatatacctatacaggctctgacataaagcccgttccaaccgtaactcttggaaaagcaaagctttctggcatcaatgattatcatgtgacataccagaacaataaaaaagcaggaactgctaccctgaagatcatcggtgataaccatttctacggaaccatcaccttaaatttccagatcactcctgcagccacaccaaagccacagactgcaaaaacattccgggatgcttataatgtctacacagtcaataccaccgggacttccgtagcactaaagggaccacgttcacgcaatactgtcactgcaaagattccggccactgtcaaagctaacggaaaaacctacaaagtcacagccattgcagccaatgccttcaaaaactgtaaaaacctgaaacaggtaacgatttcaggaaatatcacaagcataggtgccggagccttccagggatgcacaagtcttcgtactgtaaaaatcggttcccgagtttctgcgatcggcacaaaagctttctgtgactgtaaggcccttacctctgtcaccatacagacaggacgtcttacttccaaaagctcaggtaaatatatcttcacaagagcaggtcagaataattacaaaaaactgactgtaaaggttccggcaagcagactttcctcttacaaaaagctgtttcagagccagggtctgtccacacaggccagggttatcaaatagtcaggatcgtaccttgcatttccacgccccttatgctatactcagtttcgctgcaaaagcccgcaaaaaccaaggtcgtacagggcttacaaggcggtcaccgcctataaatgtgccgagtgttcgtgaccttccactcgtaaaacaaaactaaaggagaataaaaaacatgaaaaacaaaggtactcattttctggtacagggagctgccattgcagctgtatatgttgtcctgacactggtattcgcgccacttagcttcggtgaagttcagatccggttttccgaagcgctgaccgtgcttccgttcttcacaccggctgccatcccgggactgttcgtgggatgtatcatcgccaatcttcttggcggtgcgattccagttgacatcattttcggaagcattgccacacttatcggtgcattctttacctacaagcttcgcaatacaggcaaatggacagccccgatcccgccgatcgtttccaacattgtgatcgttcctcttgtgcttcgttacggatatggcattaaccttcctatcccgtttatgatgctcacagtaggagccggcgaatttatctcagccggtgtgatcggtatgatccttcttggagcactttccaaatacaaaaatgtactttttcataaaaaagcagcagtctgactaaatctgctgcccacaaaaaggagccatgagaaaacagcagcatttctcatggctctcttttattttttctctgcggattcctgcagactgcgcaggatcctcttttccattctggatacctgtacctgggatacgccaagctcatgggcgatctccatctgggtcatgttctgaaaataccgcatatagatcaacctccgctcctttgcctccagagtccccagtatctcttccagaaaaatcctgtccagtactttttcctgccgattttctttttccggaagcttgtccatcagagaaatctccgttccctcaccctgatagatcgttttgtgaagagattccacctctgcaccggattccatggtcattaccagttcttctatggaaattcccatttcctctgccatttctcccgtcgtaggttcccgctccagccggcgtgtcagtgcttctctcacctgatagatcctgtagtggttttccttcagagaacggcttaccttcagtatcccgtcgtccctgagataacgtttgatctctccgatgatcatgggaacggcataggtggaaaatttcacatcataggacatgtcaaacttatccacagctttcagaagtccgatgctgccgatctggaacagatcctccatctccacccctcgtcccagaaaacgctttgccacactgtatatcagtcctgtattttcctcaaacaaaagatctcttgccgctttatccccctggtgtgcacgcccgatgaggacaagagtacgatccatagttacctcctgatgatctttttcatgtgcactgtagttccacggccaacctccgattccacctgaagctcatccataaacgcctccatgaatgtaaaccccataccggagcggtctttatcagcctttgtggtaaacagaggctccatggcttttttgatatccgggatcccggctccgtgatctgtcacatctacctgaagctcctgcccccggagacgacattctacacggatcttatgtatctctccttcatacccgtgtatgatgcagttggtcactgcctccgatactgcggtcttcagatccgaaatttcctccagcgtaggattcagctgtgtgcagaatgaagccacagcaactcttgccaatgcttcatttaccggtctgctgtcaaaaatgatcgtcatttcatttgtgttttccatcataaacaccctcctgttcacctgccgattttttaattccacagatttcaatatattttcccactccggatagccgcagaagctttgcaatatgactgttcacattgacaacctgcacacatttccccctcatgccaagtgcccggtacctacccatcagcagaccgatcccggaactgtccataaaaacggtctctgagaaatcaaaaatcatattttttatatagttatgtccaataatccggtctgaatctctccgaatctcatcagaagccggatgatccagttccgccggaagatgtacagtcagcacggttccggatttttcaaaacctgatgtcattctatcattcccccatttttgattttttattccatttctcatgaccaaagggtaaaaaaagaggaatgcgccaacgcacattccccttatccgaggtttctcctctgtatgagttatgatcttttttattctgtataacctccatcgtaagaggaatcctcatctcctccgtcactgtagctgctgtcttctccggaatctccgtcagggctctgtgcatcttctcccgccgaagctgcggcatccactccagcttcagctgttccatctgtgctgctgtcagcactggacgttccgccagaagctccgctctcgatcccgcttacaccggtctttccgctgatagtactgtaaatcccctttgcagaatctgacagtgtatccacatataccttctgtagttccagcgccgctgtatccaaatcctcctgctgcatggcagtatatgcattaaacaaagcctcatagctctgactgcgtttctgctcttcctctgcctgcttggcaactgcatctgccgtatcactggactgggcagcttctccctgagctttggtaagctccacgctctggctggaaagagaatcactgtactgtatgatctgctgattggcctgcctgtaaatatcctgtttcacagccggcagtacaaggagccagaatgctgccgcccctgccgcaaatccaagtaccgtggtaaagaaaagtgatatctttgatctttctttataagacgacggccttacaacgatttctcctgaaatattatcattctcatttttttcatttccaaacaagcccttacgccgtttttccatctttgtggtaacacccgtctgctcgtcaacttcacgcaggaaacgaagtgtggtggtattggtcttgtcgatcctggctgcttttttcagggttcttctcgccttattccactcctgattcttcatctggatcagagcaagaagatgataccccttgatcagcttgggattctgggacaggatctttttcaggcggatggccgccatatcctcatggccttccctacacatggcgagggcattgttatatttcttgatgctttcgttgattgtttccagtttgttctggtttgcctgaagcctggcaatatattctgaagccagatttcggttcttctggatattcttgctgatgacccactcactcagtgcggcaaccacctcaccggtctcaaaatatacaagaccaagaagatttcttgcacggatattccgtttgtcataagcaagactttgcttcagacagctgatcgccccggacagatcccggatgctggctttttccagcccctgattataataaagcttggaaagataatccaccttcttctggatcagtacattggctccacagtgcggacaataatccagatctgtatccgtcaggaacgctccacagtttatgcagttcatccacttctccttatcttacacgtctgttgctcttgacctcacgcagcatctcctggagtacatccatgatatctgtgatctcccggtcataaatgacaccttctacatctgccacatccagacatggttcaaatttcttcagttcctcttcgtaatcgatcataattttttcctcctgatcacagccttgatctcaccgaccagataaagggatcctacacagaacagcattccatcctcacctttttcctttactgcccgttcaaaagctgctggaacatcctctattgcttccacttccggcactccgtcttcacggaagatctccgcaagctcttctaccggaactttgcggtatccgcctacctgtgtgacgatcacatgtcgaaaacggatcctgctacagatcgtgcggatcatatccgtatagtccttgtcatccactgcggaaaacagcagagtcagaggaaattccttctggaaatgttctgctgtctctacaaacttctcaacaccgtcttcgttatgtgcgccatccacgatcacacccggaagaaccgtttccatccttccctgccagcgtgtttttgccataccagctttcagagcctccagagataccggaatctgatcttccagtacctgaatggttttcaccgcaagagctgcattcataacctgataacgggcgataaacggtatatcaaatacggtatcgccatatgtctcgtccttaagagaaaatcggattccgtcctttgtgatcttatggatctctgtgtcttcccgtttcagctcataatatggacatcccagcttctctgcatgctcacgcatcactccggccgcatccggatcatttccatcgtagatcaccggaacacccggcaccatgatccctgccttctctcctgcgatctcggaaactgtatttccaagatactgcatatgatcgaggctgatggatgtgatcacacaggctgccggattctccacagcagtggttgcatccagacgtccgccaagaccggtctccagtgttacataatccacgccggcttctgcaaagatcaccattcccatcagaaggagtgtctcaaaataggtgggatgatagcttccctccgcaaccagctcatcggaaagctttttaactttttcaaaagcacgaaggaaagtatcgtcatcgatcacttcctcgttgatctgaaaacgctcgttgatctccaccagatgaggagatgtaaaaagtccgcaggaatatcctgcttcccgaaggaccgatgtgataaaagcacaggtacttccctttccgttggttcctgccacatggatcacacggaatttcctctgcggatctccaagtcttcttaagcattctctggtatggtccaggctgttcttagtagtaaatctcggtatatcttcaatatacgcaactgcttcttcgtaattcataaaaaaaaccatcacttatctataatgtattcgtaaagaacttttggggagaaaagcttctcccctcctgttcgttacgataccattatataatagtggtggaagatgtccagtcctaatcgtaatattttattcgacattttttgtatcggagtatcttttctatgccatttactggttgtctgtactgttttcttcaccggaatcttctgtggattccgtttctgacgctgtatccgtttcctccattgcccctgtatcagaactgctcttttcactgtcaagcttccacttgctgtcagcgagcagcgcataaaacgcccggtcatggctctttgtcatggcctttcttgtggaactgttacttcgctgcactaccgagagccggtcaaaatcatccagttcctttccggtaatgatcagcttggtaggattcacgtaaaccgtatcataccattctccgttgatcttcacctggctggacggcgtaaagtttgttccctggatataataggtgtgatccgtctcagacacaacctgaatggaatccagcgtggtatcatagattcccatacgcatctttgtccgctcaaaaggattcgctccgtcatatgtatactgctttccgtagagaagatcgtactgcagggtctccagatccacctgataatttttggtgtttcttcttgcctgatgatacttgaaaacatttccctcatggatacctacacggtccataacctctgctgccatctggtatgccgcaagattttctttctttttcttaagtccgaaattatcccacatcacatactctgtctggaacagatatttattctccacatcctccacggtcagtcccatggtcggcagatgatcaccatacatgaccagtaccacatcctccggataatctgccagcctgtcagtcagctctttgacaaaattatccatctcatggatctgatttacataatactcccacttattattcagctcgtcagtaggtgccccggaaactgtgatctccggattttccagtaccggttctgaaggataatctccatgtccctgtacggaaatagtatatacataatcaggcccttctgtagaatccagacacttgacgatctcatcggtgaggacactgtccttggtccagcccaacgggttcttctggttttcatccttcatatactctgccgaagtgaaggtatcaaatcccagattcggaaaaatacttcttcttccgtagaaattcgcctcattattatgtactgcatgagcagtatagcccagattcttcagaacatacggtgcgctctcacaggtagtttccttaaggatactcttgtaaggatactctcccggtccaaaataatgaaggctcattccggtaatggattcaaactcagtatttgcggttccggctcctacggaaggtaccttataatatccggaggaatactccttcatcagctttctgaaattcgggataggatcttctgacagctccagataatttaccagcgtaggatcaaaaaaggactccagctgtaaaaacagaatattcggatgactgccttctttcgtttccggaagattttcttccgacttctcgatccttttgatctcgcttttggaatagtctctcggggcactgattccggtattaaagatcgtcgttgccagacagtaaggatatccgtaatcctcataagctatggcaatgtttccaaaataattggaaagaactcttttttccagagcaagctgtgtaattcctccaaaggcaaggaccccgaccaggaccagcggaatattcaccttgtatttcagcttgcctctgtacttcggcgaccttatcaggatgatcagaaggatcagaaccgcaattcccagaagaactgcacctatggtcatctgggtatgggtcagatatttttttgcaatactgagaccatctgtcagattcttcacatccggtcctgtaaacggtgtgacacggttgagaagaagcacaccgtttacgattcccagaaacagccataagctgcccacaaagatacgccagaaaattctctttcggaagagataaacaatcagcatcgtcgtaaagataaacgctgcattataagcaaatacaagcggccttgtggtcatgtaggtccacgcctctgtgaacgagtgcctgcatatggcctcgatcacaaagtacaggactgcacagcccagagcctgaagtatcagcgaaatcttattgaaaaagttacaccacttcattaaaacactccttcgttatttcaccatctgtgttaactgcaggttcactttctctttcatctctttgtatttctcaagtttctccttctctgcctctaccttggctgcaggtgccttgttcacaaaattcggattgttcagcattccctcgcagcgtgcgatttcttttgtaagtcgctcctgctcttttgtgagacgttcgatctctttttcacggtcgatcagatcctccagcggcagataaaccacaccgtctgccacaacgatggataccgcatcctcaccgattccgttcttatcctgctgtacgtggatctcttttgcaaacgcaaggtttgtaaaggatttcttgcaggactcaaaacgtgcacagcactctgcatccttgcctacgatatagatattggtctttctgttctgcggtacgttcatctcgtttctggtgttacggattccacgtacaacctcctggaagcttgaaactgctttctcagcatctgcaaagttcatctcgtctttgtataccggccagtcggagatcatgatggattcttcctccggaagcagtgtgcagtagatctcttctgtgataaacggcatgaacggatgaagaagcttcagtccctgtgtcagtgcagtgcgaagtgtccacagtgcatcgtttgctgctgccggattttcctctgccttccacagtcttacctttgccatctcgatataccagtcacagagctcatcccacaggaaatcatagaccttctgtacggcaattccaagctcatatttatccatattctcagtaacatcacggatcactgtgttcagtctggataggatccatttatcctcgttgcacagtgcgttcaggtcttccggcgctgttactgtcttgccctccaggttcatcataatgaaacgggaagcattccagatcttatttgcaaagttacggctggattctacacgctcccagtagaaacgcatatcatttccaggtgcattacctgtcatcagtgtcagacgaagggcatctgcgccgtatttgtcgataacctccagcggatcgataccgtttccaagagacttactcatcttacgtccctgtgagtcacgtaccagaccgtggatcagtacatggtggaacggtgtctcaccggtctgctccagtgcggagaataccatacggataacccagaagaagatgatatcatatccggttaccagaacatctgtaggatagaaatactcaagctccggtgtcttatccggccatccaagtgtggagaacggccacagtgcggaactgaaccaggtatccagagtgtcctcatcctgatgcatatgtgtgcatccgcatttcgggcatttctccggcatctctcttccaaccaccatctcaccgcactcatcgcagtaataagccgggatcctgtgtccccaccaaagctgacgggaaatacaccagtcacggatattctccagccagtgcaggtaagtcttgtcaaaacgtgccggaacaaactgaaggtttccgtcgtccagagttttgatagcagcttttgccatttcgtccatttttacaaaccactgtggtttgatcatcggctctaccgttgtaccgcagcggtcatgggtaccaacactgtggctgtgcggaacaacctttacaagaagtccctgctccttcaggtcctctaccatggccttacgtgcctcgtaacggtccatacctgcatattttccgccaagactgttgatggtggcatcatcatttaagatgttgatctcctcaaggttatgacggcgtccaacctcaaagtcgttggggtcgtgtgccggtgtgatcttaacgcagcctgttccgaattccttgtcaacatactcatcggcaataaccgggatctctctgtctgtaagaggaagcttcagcatctttcctacaaggtctttatatctttcatcctccgggtttacagcaactgctgtatcgccgagaagtgtctccggacgagtggtcgcgatctcaacaaaacgtccttcctcacctacgatgggataattgatgtgccagaaaaatccgtcctggtcctcatgtacaacctctgcatcagaaatagaagtctggcataccggacaccagttgatgatcctggagcctttgtagatatagcctttctcataaaggcggataaatacttcctgaacagccttggagcagccctcatccatggtaaagcgctcacgctcccagtctgcagatgctcccagctttttcagctgattgatgatctttccgccgtactcctctttccatgcccaggcatgtttcataaattcgtcacggccgatctcgttcttgtcaatcccttccttacgaagcttctctgttaccttaacctctgtagcgatggctgcatggtcagttcccggctgccagagagcctcatagccctgcattcttttgaaacggatcaggatatcctgcatggtctcatccagtgcatgtcccatatgcaactgtccggttacattgggcggcggcattacaattgtaaaaggttttttgtccggattaacttttgcatggaagtatccgttatccatccattttttgtacagacgatcctcaatacccttgggatcataagtctttgcaagttctttactcatgttttcctcctgaatctttctgattataggaaccttaaaatgctcctgttctctgcaagaaaaaacacgccctccacacaaaagccaataactaatgtgcgaagggcgatcattctcgcggtaccaccttcattatccggaaaaaacatctgttattcccgtctatctcttgtcccttaacgcggggtacgtgaaaacctacacagcagcatctgcatctgttctgcatttctgctttcagtttcccggctcctaagctaccttctgcagtcctccatctgaaaatgcctttcagcctgcgcttctcttgcgtctgtgcatttctctctgtcagcgtagatctgcatactcctcttattcaacgcctttgccatgttcctactataatgaaattttctttttttgtcaagacagaggccttatttcaaaagtaaaaatcaaaataaaacagaatatctccaccggttattttttccaatggagatatttttttatctatctttcttttattgttttgtactccttctcaatgcctgcgatcagtgttttcattgtatattccagaatttcatttccgaatgcttccgatgattctcggaccggatgacgtcctgcaataccgatcagattactctcatcttcttttacctgtccaaagtcaaccagttccggccgaacagccattacaatagaggtctcatttgctccggcatgatcattctgatatttcagtctctcatcatccgcataggtccatgctgtcataatgcacagtccgtatttttcttctgcctcttccttcatttcctgaaatgcatttgttgacggaccgtgtccatgtcccacaacgatgcggactcctgctctggaaagctgtgcaaaaatactgcgcagcagatcctgaaacagtcccttttccatccagtaagcactgcccttcatctgctgggcacaatagatattcagtgcgccctctgtattgatatccattccataaaatacagttccccgatcatcaaataaacggtcaggtcccatgaacagcatcggaagcactacaccaccgaccttttctgccacccggacaaacagttcttttgactggatcccgtcagctccaagaggcatatgcggaccatgccattccagtgtgccaagtggcagataggcaaccggcatctcctttatcctctgtacacattcttccggaagtaattcctcgtataatacttttttcatgctcgtctcctcctcatataatcaagtgttttttattgaaaattcaagttttttcaacctttatatctcagtgaataagccaaagctataagcatttcgatatatcaagtactgaaatagtggttagaaggtatacgaaataaaacgtcattgatttccgctttactggccttgtgtatacccatccctctatggcagctaacctcctatatccaccaggatcatctctgtctccagaggtcctaacttgtcgggtagaaacacctattactaagtatatcccccacagatccgtacgtgcccaattcaggcatacggctcttcacgacacttatgcctcagattatccatataggctcacataaatacgtggtcttactataggatgctccttcaaaaactgattgaatccatcccatgtataacttttcctctgactatgcctattcatccaaaaataaagaatctgaataactctcttacggaagttatccatcatttgatagttatcacttattccataataatgttaatacccgattaaaatctgatttacttttgcaagaatatatttcttcttttcaaatctcatgtgtcagctatgctccttaacggggtcatatgccccatggtgactatttctgccgactactggctcattctttgtattgttgattactgacttgcttcctgtaccagcactgtgatcagtggacgttatctgttacattctgcttgattcagtggctgcccagatgacagcctctactatagttacttttttcttacgctacttgcagataagctgccggtctcctgatatcactgaccagcttttgggggtcataagccacaccttttgtcagcatcgcataaaagtcacgtatcagcttggccgcaaccgccataagtgactgcatcttctttaatggattcagttttctggttgtgtaataattatggagttctctgaactccggattcttcgctacaagcgacattgcaacctcaaagagcaggtatctgagtctctttcggccccgtctgcttattgttgtctcgcccttgtgctttcctgaactattttcaaccaatgccaatcctgcaagcttctgcagttccttcggattgctgaagcggctaatatcacctacttctgcaaggaaccctgacactgtcctgattcccacacctttgatccctaacagcttttcagccatcggaatctgttttaccagttcttcaattagaaccataacttcctgcagacgtgtatttctggattcatagtcctccagaagcattcggatctccattcttgcagatactgctccttctttgcttccaacgctgtgctctgcagcttctatcagagtcttcgccctcgcttagcggtatcttccttgacggtatcttctttagcggtgtctcctccagaattgccagcatttccggctgttccgcatcctacaagagtcagcagtgacattgatgccgcaataccggcggcaattaatttttcgctttcatatttttcctcctatttttcataatgaccaggaattcccacactgtcacggatctgcagcagatattcattttccttttcatcacatggtctctcggctccatcctgtagatacagcatgccgtttatgatactttttgcctgatattctaccggctgactaatcgtagacagtgaaggcgttatgcgttccgcaaacggaataccgtcaaacgaaactacagatacgtcctccggaattctgtaaccatgcttcatgatccaggacattacctctatcgcaacttcatcgctgtaacaaaacaatgccgttggcagcttttgaggtacaaatatcttctctatcacagaaatcagactgcttttttcatagtctccatggatctgaccgatcagggattcttcttgatccagctgcatctgccttacagctcttaaaaatccccgtttccttgcaataaggaagctgtcgtccatttcgtcaatgcaaaagatgccccctatccttctgtggccaagctgggcaagatagcatatggtctcatagacagagctttcatttttttccatgatattcaaacgcatttccggtgactgcatatgacagactttaatcctaaaatgttcttttatatacgcttcctcttcccgtgagagcagaaaaaggctaaagcagacttcgattcctctgatctccagttctcttaatgcttccagtttttcctcaaatcctgaattgcaataacggataatacagccatatcccatcttacatgcaaactcattcagataccgaaacaacagaagctgatactgattaatgtagtttgtcattataaagccgaacagttttgacttcttaccagccagatactgtgcgtgaacgctgggattataattgtactttctgatggtatctaccactcttttctgcagcttctcgctgactggtttggaacggttgataacacgggaaactgtagcgatcgaacacccgctttttttcgcgataaatttaatatctatatttgccatatttaaaattcctccggaagaattctatggttacattttataggaaaacgtttacatttcaattgtgaaatacttacaaaattagcttcaggcagatcatggtcatcccagtctttcaggatattcattacaaaactgcctgcatacagggaaatatgtaaaattcctgtatgcaggcagtcttatcatttcattattttattccacgctcttcagtgactctaccatattgatctttttcagcttaaaatgcatcaccatatttacaaacatggagaatccgaaggtaatgagcccactgtagacaaagcttattggcttgatatttcttccgaacatcaccgcatctacctcaacggttgtgatcacataacggtggaggaagattccgaacactgcgcctgccagaatccctatgaaggacagcaggatattttcccggaatacatactgggaaacttcgccatcataaaatcccaggaccttcaatgttgcaagctctctctgacgctctgtgatattgatgttgttcagattatacagtaccacaaatgccagcattccggcagaaatgatcaggacccagatcaccgctccgagggatcccagcattcgctctacctgacctgctgtgctgcttgtatagctgatacttaaagctgccggatatttcaggatcgcatttccaagagtttccagatcactctctgcatcctctttcatagtatatactgtacttgaatattccggtttctctccgaatgttttttcatagcagggtggggtcatgtaaacgtaatgtcccatatagttctctgtgacagcagtgatctttactttatactttctgttgtctttctccaggatgatcttgtctcctgctttcacaccgataagagaagccgttttttcacagatcaccgctccatcatcggtaagctcatactgctcgtgggactttctgtcacgcaatgttacatcctctttaaaattttccgtattttccggaacatacacatagatactgacacttcccttttcttttggagccgtcatcttggtgagctgcacacgggtatagtgatcgatctcgctgtttccgtccaggaatttcagaagatccttttcctggctgtctgtggcatcctcatcattgatcaccatggcatcatagtgctggatctggtcatattggagaattgcaatatccataatggaatcataaagtccgaatcctacaagcatcagtcccatgcttcctgcaattccgaaaatggtcataaaaagacgctttttataacggaagagatttcgcatggacgatttccaggaaaagctcagatgcttccatataaagccgatccgctcaataagtatccgttttccctctttcggtgcaggcggccgcatcagggatgccggcgtctctgccagggttcttgcactggaaaaaagtgtggcacccatagtacagatcactgctgctccggaagcgatcagtgcatattgtaactcataatccagctgcatgtgatcgccaatattccagtacatgattccatacgcctggataatgataaacggaagaaccttttctccgaaaagtactcctgcgatacttccgcctactgtagccagaaatgcgtagctgagatacttggatgcaatggatgcttttccatatcctagcgctttcatggttccgatctgggttcgctgttcctccaccattcgtgtcatcgtggtaagactgatcagagccgctacaaggaagaatatcatcgggaaaacctttccgatgtttttcagtcgctctgcgttatcaccaaaatccgaatattctggaaggtcattgcggtccgtgacgatccactccggtgtttcaatatcatccacctctttctgggcatcctcgatcttctgctgggcttccgcaattttgtcatcggcttcttttttgccgtcctgatattctttctttccatcggaaagcttctttttggcgtcctccaggtcttttttggcgtcttttaatttctgttcattttcccggatctctttttcaccatccaggagcttctgttcatttacatccagttctgcctgactgctggtaagcttttctgtattggcctggatctctgcctgaccggcatttaactgggcctgtttttcctccagctgctgccgccctgagctgagctgggctctggccgaatccagctggctctggccatcatccagagttgcctggtttgccgcaatttcttcttttgccgcggaaagctctgctttctttgtttccaattcttttttccctttatccagttcttcctggccttcgttcagctgtgcctctgtcccggaaagtgtctcttcctgttctttgatctggctgaagccctcattgatctgacctaggctgctctccaattcagctcttgtctgggccagctctgatttttttgcagtaagctctgcctgcgccccgttgatctgggtctgaccggcatttatctgttcttccattgcactgatctgaccatttaaagtctggatctgcgtggaaagctccgccagctcttcctcggtttttcctgcttccgcaccggcgtcatactgtgcctgcagctccgccgcctgactgcttaatgcctctttctggctggtcagttcatccagctgtgcctgctgcccggaaagggcttcttcactggaactgatctgggattcgccctcggaaacctgtacaagtcctgcctcacactgttctttctgaccagtaagagcagcctttgtttctttgatcgtattctttcccgtttccaactgttctcttccactgtcaagctcagcctgtttgctttccagtgttttctccgcttcccggagctgggcctcaccgtcacttacctgctgttttgcggcattcagctgttcatatccggcagtcagctctgcctgcttctcatttatctgtgcttcggagtcggcaagctgggatctggcagaatttaactgggacagaccgtcttccacctgctgttttgcgctgttaagctgagaccatccatcttcaatctgctttcttccgtcagcaagctgctgttttccatcggtcagctccttttttgcatcactgagctgctgttttccatcttcgtactctttttttccatcctcatacttcttctgcccatcatccagctttttcttcgcgtcgccaagtttttcctctgattccttctttccgtcctcaagctcttttctggcatcattcagtttttcattggcttctgcgacgatctcctcgtagcgcagactgcactgttctttttcgataccttccacacgtttccggatctttttgataagattgtcgtaggcatctgtatagctgatcacatccccggattcatggaccataacatagatctggttaaaagcctcctgctcaaaatcctctggaagaatgtatccgaagccgctgacctcaccggatccaagagtcgtatttcctctgttaaatgaaatataaagagggctgcttccgattcccacaactgtataggttgtttttttcagaagctcactgtctccatcctcactgacagatatggtatccccgattttatacccccgattctttgcaaatggcttgtcgagaaaaatctcgccgcttttttccggtatccttccttcatctgctgtgagcagattaaaattgctgctgatggcttccagatgaagaaccttcctggcatcgtcctctccactcataacatccgtagagtaactgccctcagccagttccacaccgtcaatatccgataccgcttttacatcacgctgcgtcagtcccagggttccctggatcttcagatccatcagctttgccgcttcataataagcatctccggaatatctcatatccggagaagacgcctggatcccggaaaaaaatgcaacacccagtgccacgatcagaaagatcgagataaaacgtgctttacttttccggatctccatccagaaatctttgtgtaatgctttcattccgtcacctaccattcaatctcttccactggtgtgggatgtgcattttcagtcatcctggaaaccttgccgtttttgatcttgatcacacggtcggccataggtgtcaatgcagagttgtgagtaatgacaataaccgtcatgccccgttccctgcaggtatcctgaaggagcttcaggattgccttgccggtctgataatccaacgctcctgtaggttcatcacagagcagaagctttggattcttcgccagcgctctagctatggaaactctctgctgctcaccgccggataactgtgccggaaaattggtcagtctctccctcagccctacttcctccagaactgtcctggcatccagaggatccttacagatctgaagagcaagctccacattctccaatgcagtcagatttggcaccagattataaaactggaatacaaatccaatatcctcccgccggtatccggtcagctgccggtctgtatattttgcaatattttttccatcgatccagacattgccggatgtggccttatccattccgcccaggatattcagcaccgttgtctttccggcaccgcttggtcctaccacaaccacaaattctcctttttttatccggaagctgatctcatccacagctatgatcttcacttcttttgatccatagattttggatacattctccagcttcacatattcttccgtatgctccatttccacccctcctctttactctctatatgatttcagggggcttttatctgcccccttttaattctctcactcacgtatcacagctgtagaaaaatgttttcggctgtgatcgaatattatcaataactatatttataagtatatcggttcttaattcaaaatgcaatttctacttatattttacaaagatttttcattcctgcgcatttgtattttacatttcttttctataatacagacagataaaggaaatcaatattatggctgactgttgctgacaacagcagaagtataattccagcaaaacaggaggaatggattatgtataaagtactgtggaatcacttagatcaaaatttaaaaaaggcccctgcgccagctgtttttcttgcacttttgacagttggatggagtgtagccggaattcttgcaggattacttgtttgtctggaacttcagacagaactgatggtgaagctgactgtgatcttatgtgccggtggatacgccggactgattcccggtttcttcggtgggatcttttatctttaccgaatggatcttcggaaaccttctgcgggtcctgcagctgatctggcagctgaagcggaaaaagcttctgccgatcctgcttcattgatctattttcacaataattgacaaaaaagcagaactctgcctggttgtacagggttctgctttttttattgaatatgtgtattaagtttgattactttcttatggaatccgcaagcttttttgcttctgctgtcagttctcttattttgtcaaattctcctgccttcacaagatctccttttaccatccagcttccgccgcagcagaggattttgtcacaggaaagatagtcctcaaggtttttcgcattgatcccgccggtaggcataaaacggattcctgtataaggagctgccatagccttgatcattgaaattccgcctgccggttctgccgggaagaattttactaccttaagacctcttttcactgcctgcgcaacctcagatggtgtgatacatcccggaaaaacaggaatgtctttttccagacaatagtctacgatcttaggatcaaagcccgggcttacgataaattttgctccggcgccaacagccgcgtctacctgttctgttgtaagtacggtacctgctcccacaagcatttccgggaactgctctgccatgagacggatagactcttctgctgcttctgtgcggaatgtcacctctgcacatggaaggccgccctcaaccagagccttcgccaacggtactgcatcttttgtatcttccagcactacaaccggaaccacacaaaatttctgaaatttttctgctatctctttcatctgaatttcccttcctttttatctttttatatcaaagttcatttccatcacatgtctgatcatagatacatcatcggtaatgtttccatcaccatggatcgtatgcttcacagcactggcagcaacaccgaaattcacggtatcttccggtgtatactcattcataaggccatagatgatcccacttacaaatgcatctccgccaccgacacgatcaagaatgtggaaggtcaggcgcttgctttcgtaagtctttccgtttaaccagagatatgccataagactgttttcactgcagctatgtgcaaaacggacatgtcttgcaatgcattttatattcggatatctgtccgcaaatgcccggaacactttttcctgctgttcaaaatccggctgaaacgggattccatcctttacatcccctgcactgtggtcttcttcatttttccagatatggtacggctcgatcccgaaaaggacatttacatatggaagacaaagtgtacagaaatctctggcctcttcccaggtccacagcgtacttctgaaatttccgtcaaagcttacggtcatgttcatttcttttgctgccttcaggcagtttaagatcagatccctgcattttgttccaagagcaggtgtgattccgctcagatgcagccatgtatatccttccagcatttttttcacatctgttttgctgaaatcatactcggaaaaagcgctgtgttttctgtcgtaaactaccttgctggggcggatcccgtagccggtctccagataataggttccaagacggtgtgtcggagtttcttccgctgtggaataaaccacactgtcacagttcacatcattgcttctcatcatacgtacagaactttttccaagactgttgtccggaactaccgtaaaaaacgaagcatctattccaagatttgccagggaaagggctacattcgcctcgcttcccccgtatcttgcctcaaaggttgttgctgttctgattttttcataatccggcggtgtcagacgcagcatgatctcgccgagagtaataaatttatgtttcatgatcaatactccagataggctcccttcattgggcttgcagcatgctcactgaaaagtctcagcacgccttttttgtattttggttctcttggcttccagtttttacgtctcacggcaaggatctggtcgatctcttccatagactttctttcgcctgcgatcccgatgatgttcagctttctttccataacgtcgatctcaataaggtcgccttcctcaacaagtgcgattgggccaccgtcaacagcctcagggctgcagtgtccgataacagggcctgtagatgctccggaaaaacgtccgtctgtgatcagtgcgatactctttccaagctctttatcactgctgatcgcctcagatgtgtagaacatctccggcattccgcttccctttggtccctcgtaacggatgaatactgcatcacctttctggaccttatgcttcagaactgcatccagacactcctcttcactgtcgaacggtcttgcacggagaaaggatttaaacatttccttcgggcatgcggtgtgcttgatcacagcaccctcaggtgcaaggtttccacgaagaactgcgatacttccgtcggttccgattgccttgtcatatggacggatgatatcttcctttgtaaggcttacgttgtagcgtttgttaaattcctgaagccatttgtcgcatttctcataaaatccgttgttcttcagctcctcaaggttttctccgagagtctttcctgtaactgtcatcacatccagatggagatgttccttgatctcctccatgattgccggtacaccacctgcataatagaaacactcagcaggccagcgtcctgcaggacgtacatccagaaggtatcttgcatttctgtgcagtctgtcaaaggtatcacctgtgatctcaatgccaaactcatgtgcgatcgccggaatgtgaagcagacagtttgtacttccggagattgcagcgtgtacaaggatcgcattctcaaagctgtccatagttacgatatcagaaggacgcatattttccatctgtgcgatccttactgcctgtcttcctgcctctcttgcgaaagcaagaagatccgggcttgttgacggcatcagagctgtaccaggaagtgtaagtccaagtgcctctgccatgatctgcattgttgaagctgttccgataaaggagcaggctccacagcttgggcaggcattgcattttgcccagtcaagcttctcttcgtcgatctctccacgctcaaactttgcactgtacattcccagctgctcaagggtcagcatctcaggtcccgcattcatggttccgcccggaacaaatacggaagggatatttactcttgcaagtccgatcagatttcccggtacacccttgtcacagcttgaaagatatacaccggcatcaaatggtgttgcatttgcatggatctcgatcatgtttgcgatcatttcacggcttgccaggctgtagttgattccgtctgttccctggctttcaccatcgcagatatcggtacagttatagcgtgcaccaaaaccaccttcttctgcgattcctttacgaacttcttccacaaggatgttcaggtgtccgcttcccggatggctgtcaccataagtgctttccaccatgacctgaacctttcccagatcttcttttttccatcctgttccaaggcgcagcggatcaagctccggtgcaagctttctcatttcctgacttactaacttcatgattttttcctccatttcctattctctgatcagattcagattttccagcttttctctaagttcctttacatcctcttcttctgctccgatttccacattatcaaatgtaggaaggctgaatactcccagcatggactttgcatctacgatatatcttccgcagatcagttccacatccttccggcagccggatgcagcctgtacaagatgctttgcatcatacatgtctcttaaataaaccggtatctttatcattacgctctgcctcctatgcaaaaattgaaataacaaagcctacaacaagtgctgtaacaccgatcagtgtttccatgattgtccaggattttaatgtcgttttttcgtcaatctcaaggaaagtacttaccagccagaatccggcatcatttacatgactcagtgcagttgcaccaccgcagatcgcacagcacatagcagctctgtaaagcatgcttgtatccattactgccggcatagtcgccatgattcctgatgccatggtcattgccacaatggagcttcccacagatgcccttaccaggattgcgatcagaaacgcgatcaggatcagcggaagaccgcttttttccagggccggtccgataatatttccaaggccggaatcctgaagcatccatcggatcactccgccgctggcgatgaccagaaggatcattccaaccggtctcagtgaatgatccagtattttctttaactgtgcaccggtaaagccacgacggattccaagaaaatacattgctgcaagcgttgcgatagtcagtgccagaaacggttttccgataaatccgagaaaactctgtattcctgccggaattggcatgtatttagatacagtactgagaaggatcagaacaagcgggatcagtatcacgccaagcaccagaccaaatggcggcaactcttttccatcatctttgatctcttccacattggccggaagttcagtgaaaattttgtttccaaccagatttccccagataattcctgaaaccagcatacagatcagtgcagttggaactccaaccatgatcatagttcccaggtttacgccaagtgcattggcaaccagtacagatcccgcagaaggcggtacaaaagcatatccgctggcaagacctgaaagaagcggaatcgcataatacagtgtggatttttttgtctgctttgcaacactgaataccagtgggatcagtactacaacacctgcttcaaaaaatacggttgtaccgatcaccagtccggtaagtcccaatgcccatccggcttttttctgaccgaatttgtcgatcagtgtttccgctattctttgggctcctccgctcacttccagtattccgccgaacatggaacccagtcctaccagaagtgcgattccctgtaatgtctttccaacacctttttctactgtgtctgagatcatttccagtggcattccggcacctgcaccgatgatgatcgctgaaatcatcattgacagaaccggatgcagtttaaatttgatgatcagcaccagcaggatcacaattcccactgccgcagcaagcatcaatctcattggatctgctgtaaatgttgtttcttccattttttctgcttttgcctccttaattcatccgatgttttacttttcgttaaatacatctgacctttctgctgttttttcttttgaattgtgctgattttctttgtttttgcttcaattcatctgatgtatttataatatattcattctgtcaaaaacgcaatactgtaattttatctaaattatcgtcttattttttgtgtattttgtcgttttgacattatagtttaaaggaattattatagatataaggaaaatataaaaagaaataacgaatagaaatggagaaactcatatgatgatttcgtcatcagaagaaaaaagtcttccgcaaaaattatcggaagacatcatcgcatttattttaaaggaaaatctgcagcctggagacaagctgcctaatgaaacggttctgtccgaacgtctgaatgccggaagaagctctgtccgcgaggcaatgaagcttcttgcttccagaaatatcgtgacgatccgtcagggatccggaacttatatcgcatcatctccgggaatggtggaagatccgctgggattaacttttatcggcaacaagcagaagctgatccatgaccttcttgaagtccgttttctgcttgaaccctctattgcagcaatggctgccacccgcgccaataaaaaagatataaaaaaaatcaccacactttgtgatgatgttgaagcattattaaaaaaacatgcggaccatacccagaaagatattgaatttcatacagcgatcgcgctgagcagcaaaaatgttgttgttccgcggctgattcccgtaattaacagttctattccattatttgtcgaatcaaccagtggcgctctgcatgaagaaacaattgaaacacatcgtgaaatcgcagatgccattgcagaacatgatgctttgcgtgcccaagatgccatgtaccttcatctggtttataaccgtaaaagaatcctgcttacagaaaaaaattcctgatctgtcggacagcatccggaaaggatgctgtccgatttttcagaagtctggcttcacggtcttcagcaagtacatttttatagtaaaaataagccctggaaattcatctttccagggctttctaagaggtgccacccggatttgaaccggggatagaggtgttgcagacctttgccttaccacttggctatggcaccatgctccccctgttggactcgaaccaacgacactgcggttaacagccgcatgctctaccgactgagctaaggaggaatatttaatttaaggtttgtaccttaaaaactacatacatgcttgttgatcgttaatcaaactctttgaatcaattcttaacctgcgtttcttggtcaagccctcacccgattagtaacagtcagctccatgtgttaccacacttccacctctgccctatctacctcgtcgtcttcaagggggtttacttcataagaatgggatatctcatcttgaggggggcttcacgcttagatgccttcagcgtttatcccttccggacttggctacccggccatggctttggcaagccaaccggtccaccagcggtccgtccatcccggtcctctcgtactaaggacagctcctctcagatatcctgcgcccacgccggatagggaccgaactgtctcacgacgttctgaacccagctcgcgtaccgctttaatgggcgaacagcccaacccttgggacctactacagccccaggatgcgatgagccgacatcgaggtgccaaaccactccgtcgatgtgaactcttgggagtgataagcctgttatccccagggtagcttttatccgttgagcgatggcattcccacttaataccaccggatcactaagccctactttcgtacctgctccacccgtcggtgtcgcagtcaagctcccttctgcctttgcactcttcgaatggtttccgtccattctgagggaacctttgggcgcctccgataccctttcggaggcgaccgccccagtcaaactccccgcctggcattgtcccaccgccggattacggcggctggttagaagcccaatatcacaagggtggtatcccaacagcggctccgcggcaactgacgctaccgtttctcagcctcccacctatcctgtacatgcaacaccggaccccagtgccaaactggagtaaagctccatggggtctttccgtcctggcgcgggtagccagcatcttcactggcacttcaatttcaccggatgtattgccgagacagcgctcaaatcattacgcctttcgtgcgggtcggaacttacccgacaaggaatttcgctaccttaggaccgttatagttacggccgccgtttactggggcttaaattcaaagcttcgacttacgtctaacctctcctcttaaccttccagcaccgggcaggcgtcagcccatatacctcacctttcggtttcgcatagacctgtgtttttgctaaacagttgcttgagcctattctctgcggcctgctctcgcaggcaccccttctccctaagttacggggccattttgccgagttccttggcaatacttcttccgccggccttaggattctctcctcatccacctgtgtcggtttacggtacgggtacaatatgaacgatagcggcttttcttgacgcatggctcacgggcttcgctactaatcttcgctccacatcacgtcttcccattgccacacggattttcctatgtgactggtacctcgcttgtaccgggctttccattcccggctcccgctctccttacgtgtccccacagttctgtcatactgcagtacaggaatatcaacctgttgtccatcggctacggctctcgccctcaccttaggtcccgactcacccagggcagatcagctttaccctggaaaccttggatattcggcctagaggattcccacctctatctcgctactcattccggcattctctcttccatgcagtccacagctccttccggtactgcttcttcccgcatgcaatgctcctctaccaatcttttcagattccttagtttcggtggcgcgtttcagccccggacattttcggcgcaggacctctcgaccagtgagctattacgcactctttgaatgtatggctgcttctgagccaacatcctggttgtcttcgaaatcccacatccttttccacttaacgcgcactttgggaccttaactgtaggtctgggctctttcccttttgaccgcccaacttatctcgtgcagtctgactcccggtgatatctacacggcattcggagtttgatattcttcggtaggctttgacgccccctaggaaattcagtgctctacctccgcaagactcacaccgaggctagccctaaagctatttcgaggagaaccagctatctccgggttcgattggaatttctcccctatccacacctcatccccacccttttcaacggatgtgggttcggtcctccactacctcttacggcagcttcaacctggacatggatagatcacccggtttcgggtctactcctactgactctggccctattaagacttggtttccctacggctccacacctgaagtgcttaaccttgccagtaagcgtaactcgccggaccgttctacaaaaagtacgcggtcgtacatataaagtacttccacagcttgtagacacagggtttcaggttctctttcactcccctcccggggtccttttcacctttccttcacagtactatgcgctatcggtcactaagtagtatttagccttagggggtggtcccccttacttcccacaaggttcctcgtgtctcgtggtactccggatcctgctcagtcagctctgctttcacgtacggggctttcaccctctccggccggctttcccaaaaccgttctgttaacttcgctgaatcttaaatgcagtccatgaccccggcatgcacgcacaccggtttaggctcctccgcgttcgctcgccgctacttacggaatcgatgtttctttcttttcctccgggtacttagatgtttcagttccccgggttcccttccatacgttatggattggcgtatggatgcatgaggtctgctcatgcgggtttccccattcagacatctccggatcacgggatatttgctcctccccgaagcttttcgcagcttatcacgtctttcatcggctcttagtgccaaggcatccgccctgtgcccttattgcttgacctttcgcttcatcaccctagcgtaggtgatgcggtctcttgattctcgtgttactacagtaagtgctttcttctcacgaagtttgcactcacgttcgtaacgtatgtgtttgattactctgttcataacagataaatcgatgtcttcctatctttgcgtttgcattaatttcttaatactttgcgtttaaggatatttgattaacttaatcaaatttcatgtatgcagttttcaaggtacaatgctgactgatgttttatcagccatctgaaaggaaaatagctttttctctcagatcactggtaaaaccagcatctatctcatcaggtttccctgtctttctttttttgatctggcgcccacctgctctcccacaccgtctccagtgcagtaccatcggccgattgggtcttaaccgtcgtgttcgggatgggaacgggtgtgtcccccaaccgcatcggcaccagaaatatctcagcttgatagctaaacagtaaaacacatttcttttctctactttttccttagaaaggaggtgatccagccgcaccttccgatacggctaccttgttacgacttcaccccagtcatcggtcccgccttcggcagctccttccttgcggttaggtcactgacttcgggcgttactgactcccatggtgtgacgggcggtgtgtacaagacccgggaacgtattcaccgcggcattctgatccgcgattactagcgattccagcttcgtgtagtcgggttgcagactacagtccgaactgggacgttatttttgggatttgcccaccctcgcaggttcgcttccctttgtttacgccattgtagcacgtgtgtagcccaaatcataaggggcatgatgatttgacgtcatccccgccttcctccaggttatccctggcagtctcctcagagtgcccggccgaaccgctggctactggggataggggttgcgctcgttgcgggacttaacccaacatctcacgacacgagctgacgacaaccatgcaccacctgtctcctctgtcccgaaggaaaggaacggttaagttccggtcagagggatgtcaagacttggtaaggttcttcgcgttgcttcgaattaaaccacatgctccaccgcttgtgcgggtccccgtcaattcctttgagtttcattcttgcgaacgtactccccaggtggaatgcttaatgcgtttgcggcggcaccgaagagctttgctccccgacacctagcattcatcgtttaccgcgtggactaccagggtatctaatcctgtttgctccccacgctttcgagcctcaacgtcagttaccgtccagtaagccgccttcgccactggtgttcctcctaatatctacgcatttcaccgctacactaggaattccgcttacctctccggcactcaagacgggcagtttccaatgcagtcccggggttgagccccagcctttcacatcagacttgtccatccgtctacgctccctttacacccagtaaatccggataacgcttgccccctacgtattaccgcggctgctggcacgtagttagccggggcttcttagtcaggtaccgtcattttcttccctgctgatagaagtttacataccgagatacttcttccttcacgcggcgtcgctgcatcagggtttcccccattgtgcaatattccccactgctgcctcccgtaggagtctgggccgtgtctcagtcccaatgtggccgttcaccctctcaggccggctatggatcgtcgccttggtgggccgttacctcaccaactagctaatccaacgcgggtccatcttataccaccggagtttttcacaccggaccatgcggtcctgtgcgcttatgcggtattagcagtcatttctgactgttatccccctgtataaggcaggttacccacgcgttactcacccgtccgccactagaaacaatctaaatctgccgaagcttcaataaaaggtttcccgttcgacttgcatgtgttaagcacgccgccagcgttcatcctgagccaggatcaaactctctgataaaatgtttgattcatttactcaagacaaccgtttggctatctctcgtttttactgcttttggtttgtttaaaccgttctttaaatgtaaagaaattttcgagaatcgtatgtgtttcactgtttagttatcaaggtttgttgtgtctgtctctcggacagcttgttcattttatctcattctcaactgcttgtcaagaactttttttaatttttttgaagtatttagtcttcaaaaaaatcaaaacggagaaggagggatttgaaccctcgcgccgcgttaacgacctactccctttccaggggagccccttcggccagcttgggtacttctccaaattgccctacttactaagtagttccgatatttatctctgccgttctcagcgacaggtgatattatatctcgtatcttttatgttgtcaagtactttttaacttttttaaaaagtttttattctgtatttgacaaacggagagagtgggattcgaacccacgcgcccttgcggacaaacggttttcaagaccgcctcgttatgaccacttcgatatctctccatataatgtttttcaacattttttgtgctgttttgtcagcgcatgttgtattctatcatcaaatatctcccctgtcaataacaaatttgatatttttttcaaaaaattggacatatagcttcaatttctgctatatgtccatatttaccgggattttcaccctgttctactctctgttctactctctattctactctctgttttccttcaaaaatgcctccgcaaccaccagatcttccggtgttgtgatcttgatattgcgataagaaccttctgaaaagcggatcttcaccccggtctcatgttctgcaaccatggcatcatctgtaattcctgtcatttccttctgccgaatgctggtatatgcgccatagatcagtgggtactgaaagatctgcggagtctggacgatccatacactgctgcgatccggagtttcactgacattcccatcctcatctgcgatcttaactgtatccttggaaggcatgcctgtaacactggcacctgtctgtgctgctgccataagtcctctttcaatgatcccatgatcaataaatggtctggcaccgtcatggatcagcacatactctgtgtctttacacgcacgaagtccttcataaacagaatcgtaccgttcttttccgccggatactacagcagaaatctttgtaaaaccatatttttccacgatttcttctttgcaccagaaaacatactcctcccctgttaccaggatcacatccctgatcagcggactttcctgaaaacagcgcagagaataacagagcaccggcatcccgtcaagctccataaactgcttctgtattttgctgtgcattctctttccctggcctgctgccaggacaatagctgtatttctgcactctcccatgatcaattaccccggattcttttatctttcgccaagcttcaggttcggaaccgcattcagatcccagctgtggcgtgttcccctgatatattcatagtaagctgccacaccgatcatcgctgcgttatccgtacagaagatcggtgacggacggtaaaatttgtatccacgttctgtacatgctttttccatagcagtgcgaagtgctccgttggaagcaacacctcctgcaatggcaacctttttcataccaaaatcagctgctgcctgcatggtatgctctaccagtacgtcaacaaccgccttctggaaggatgccgcgatatctgcacggtttacttcctcacctttcatttttgccccgtttaaataattaagaactgcggacttcacgccgctgaagctgaaatcatatggattttcaccgatttttgcacgtggaaactcgatagcgtccggatttccttcctttgccagcttatcgatcttcggtcctcccggatatcccagcccaatggcacgtgcaaccttatcaaatgcctcacctgccgcatcgtctctggttcggcccaggatctcaaactggccatagtccttcacaataacaagatgggtgtgtccaccggatacaatggcacagagaaacggcggttccagatccggatgctcaatataattggcagaaacatggccttctatatgatgcacgcctaccagtggcaggtttcttgcataggcaatggccttggcttctgccacacctacaagaagtgcaccgacaagccccggtccataggttacaccgatagcatcaatatcatccagagtgacatttgcctcgtccagcgcttcctggatgacctggttgatcctttctatatgatttctggaggcgatctccggtacaacacctccgtacagtttatggatctcgatctgtgaggaaatcacgtttgataagacagtccttccgttttttacaacggaggctgccgtttcatcacaggagctctcaataccaagaattaatgtatctttcatttttttcagtcctcttcaaaattcagttccacactcttcccgtcttttcccggccatgccttcggaaagatctcacgtactgtatccatgtaatcatccggacgtaccagagaagggctgtaatgggtcagccacatttcccccacttccgcatcacgggcaagagtggccgcttcacgaaacgtcatgtgtttgtagccttttgccttttcgatcttgtcatcttcaccgtacattccctcacagataaaaagatcggaatcttttgcattacgtaaaatagactctgtcggtctggtatctgtggtataggtaagcttgatcccttttcttggcggaccaagcaccatatccggtgtgtagatccttccttcatcctccacagtctgtcccttctgcagcggattccagaatttcagcgggatctcatgtgcactggcactgtcaggagaaaattttccctggcgcaggatctcaagggtatatccgtagcaggtaacattatggttcacccgaaatgcagtgatccggtacccattcagttccagaacttcctccggtttcgtgatctcgataaatttaatttcaaagggcagctccggtgcgatcacacgaagtgcgcttaccacacgttccagtcctcttgggcctaccagagtcagcggttctgtgcggtctgcatttcccatagtcaaaagaagtcccggaagtccgctgatatgatccccatgataatgggtaaaacagatcacatcaataggcttgaagctccagcccttttctttaatggccacctgggtgccttccccgcaatcgatcatcagactgctgccgttataacgggtcatcagtgcggtgagccatctgcgtggcagcggcatcattcctccgcagccaagtaaacaaacatctaacatatttttcctcttttcctgttctgtggcaaagtttagcatacttatcccgtacagacaagtacctctcccgggtaagcctattcagaaactgcggtgcgtgtcataagaacagcatcctctgtgggatctgtatagtatccctttcgcaggccatcccgcacaaatccctgacgttcataaagccggatcgcagtctcatttcctgcccggacctccagatggatcatggtgatcccacgctcttctgccagacggatcatactttccataaggaaatttccgattccctctctctgacggtctctgcggacagccacattggtcacatccccctcatccagcaccgtaagaagaccacaatatcccaggatccggcccttttcttccacaacaagaaacatcccattctctttcataagaaatgtcagaaatccctcttttgtccaggggactgaaaaaagttcctcttcgatctccataacctgatccagatcatccacaagcatttctcttaagatcatgcgttttccccttctgatccttttttcagtttctgggcacgctcccgctcagcctgtgaaacacggagataatccggtttgtgctcagccgctgtctcggttctgccttctttataataaaggacaccaagtgcacctacagcacctgctctctgtctggaaagatgggccggtgcaaaagaaaacggtacagtaagcttatctgcgatgatatctttaaataccgggactccgtctccgaggaatgttacggcttctcccatctcattcagcatggaaagaagctcctcaattcccactgccatctgatcctttaccgtcatgagcctgtgatcctcgtaacgatagattcccgtataaacctgctttcttctggcatccatgatcggacagatcagtccgtttacatcatagatattataggccagtgcctccacagtcggaatcccgaccagtggtttgtcaagggcaagtccaagtcccttggctgtggcagagccaatacggagtccggtaaaagagcccggtcccttggctaccgcaatagcgtcaatcgtcttcagatccagctctgtcatcttcacgatctcatccagcatgggaagaagcgtctgggaatgtgttttcttataattaactgtatattccgctaccagtgtatcgtcctccacaacggctacggatgccacgattccggaactgtccagtgccaaaactctcattctgtcttttctcctctctcctcaatggtgatctttctgtattcaaagcccctctcaagatctttttcaatggtaacttcgatccttttttccggcaggatctcctcaatgagttccgcccattcgatcagacagattccctgcccgaaaaaataatcatcgtatccgatctcttccatttcttccagatccccgatacgatatacatcaaaatgataaaatggcagacgtccgtcttcatattcctggataatggtaaacgtagggctgtttacaggttctgtaattccaagacctgctgccactccctgtgtgaacacggtttttccaactcccagatcgcctgtcagtgtgtagatctgtcccggcttcgcattcattccgatcgtccttccgacctcgaatgtttcctcaggatcatgcgtttctatgaccatattttccacctttttcttgcacaattattctttgcatattataatagagcgaacagcgaaatacaatactttttgaaaaggagtgcgaaaactatggcaaatcctatcgttaccatcacaatggataatggcgatgtaatgaaagcggaattatatccggaagttgccccgaacacagtaaataacttcatcagccttgtaaaaaaaggcttttatgacggcctgatcttccaccgtgtcatcaacggctttatgatccagggcggatgcccggacggaaccggtatggggggcccgggatacagcatcaagggtgagttctcccagaaccgtttcaaaaacgacctgaagcatacaccaggtgttctctccatggcaagagccatgaatccgaactctgccggaagccagttctttatcatgcacaaggctgctccgcatcttgacggaagctatgctgcattcggtcagatcattgagggcatggatgttgtaaatgctatcgcagagacagacacggactacagtgaccgtcctcttgacgagcagaagatcagctccatgactgttgatacctttggtgtggattatccggaaccggagaaatgctaacaggaataattttctgaaataaaaaagccccgcgaagagcagactgtaacacagatcatctgccctcttcccggggtatttttatactgacattctcttttcttttacttttcgaaggtcttcacttctccgtttactttcgcaaaatacagttctgcatccttctcaagtccggctcttccgtttgttccttctgtgatcgccttcttcacctcttcgacctgatcatccggcacaagaagcttcaggacaaccttgtcggtatattcggaatccaggatcggcaaacttctttctcctgcgatatactggatctttccgatccctgtataatccgtcgtcacctgaagagagatcccatgatgcttctcaatgacggtacttgccgccagtcctgcctggactgcaccggaatatgcccgcacaagccctcctgtcccaagaaggacacctccaaaatatctggtcaccacaatggccgcattatagatcccggctcccagaagtacatccagcataggccttccggctgttccggatggttctccgtcatcactgcagcgggtggcttcccggttcatccctacggaatatacatagcagttatgacgtgcatcccagtatttttttttcatttcttcgataaaggcaagggcctcttcttctgtttccacaggacggacggttgcgatgaaacgggattttttttccacaagttcgccttcgccgccttcgtatatggttttataatgttccagcatggtttacgcctccgttatctatatccaaccctctgtttcaggcagagttttctttattgtataataattatcttcattgcacaatgtataagatatcatgaattgtgaaattttttttaaggctttatttggctttccatatttgttataatgaaacggattataaaggaggaatattatgaactacggaaaaagatccacttccaagaagcggaatgctctgatctcccgtacttccatgctggaaaaaagagcacatgtttcgtttatccgggttttatttacagctctgatcgcagtctgcgtcatggttgtctgccttggtatcggctccttccggggcgtgatcgccggagcacctgacgtcaacgatgtggatatttcacctctcggatatgcaaccttcctgtatgatgaccagggaacacagatccgacagctttcagcccctacatccaaccgtcttccggtctccctggaccagatcccggtcagtctgcagcatgcagtggtagccattgaggatgagcgtttttatgaacataacggtattgatgtccgcggtatcgcacgtgccggaatgaaggcgatcaccaccggtaacttttccgagggtgccagtaccatcacacagcagcttctgaagaataatgttttcactgactggaccaacgaatccacacagctggaacgtttcacacgtaaattccaggagcagtaccttgctgtacagattgaaaaaaaatatgacaaaaatgtgattcttgagaattacctgaataccattaacctgggtgcaggttcctacggtgtacaggccgcttccaaaaaatactttaacaaagacgtatgggatctgaacctttctgaatgtgccacccttgccggcatcacgcagaaccctaccaaattcaatccgatcaccaatccaaaagcaaactccaagagacggaaggaagtcctggatcacatgctggatcagaattacatctcacaggatgaatataatgcagcactgaatgatgacgtttattcccgtatccaggccgcacagcttgagaacaccgaagaagaaagtaccgtttacacgtatttcgaagatgaggttaccaatcaggtcatcagcgacctgatgaacattaaaggatataccaagacacaggctaccaatcttctttacagcggtggtctgaagatcatgacaaccctggattccaacatgcagcagatccttgatgaggaatatgcaaaccctgataactatccggccaatgttcagtatgaactggattatgcactgactgtacaaagcccggatggaaaacagacaaactacagcaaagaaatgctgcagctatatttccgtgatcaggatccggaatttgatcttctctttgattctcctgaagaaggtcagcagtatgtggatcaatacaaggctaacatcctggcagacggaagcaccgtagtatctgagcgtgtaaactttgcgccacagccacagtcttccatgactgtcattgaccagcataccggttacgtaaaagccctgatcggaggccgtggcgaaaaaacagccagcctgaccctgaaccgtgccactgatacgaccagacagcctggttctacctttaagatcgtttccacctatgcacctgcgttgaacgaaaaaggcgatacacttgctacaacctttatggatgagccttacgaatacccggacggatctcctgtcaacaacgcctcaagaagctacggcggcgagaccaccatccgcaaagcgatccagaattccatcaacgttgtagctgttaaatgcctggagcaggttaccccggctctcggccttaaatatctggatgatttcggtttcaccacactagctcacggaactgaggcagataaagatgccaacggaaatatctggagtgacgccaacctggctactgctcttggcggtatcaccaaaggtgtcaagaacgtggaactttgtgctgcatatgcagccattgctaatggcgggaactatatcaaaccgatctattatacacagatccttgatcatgacggaaatgttctgatcgagaactcctccgtttccagatctgtgatcaaagacagtaccgcttatcttcttacaagcgccatggaagacgttgtaaaaaaaggtaccggtaccgcctgccagctggacaatatgactgtagccggaaaaacaggtactacagaggactacaatgacctgtggttcgtaggctacacaccgtactacacctgtgcagtatggtccggctatgacaacaacgaaaaaattccggaagatgcccgtaacttccacaaaaacctctggaaaaaggttatgacccgtatccacgagggcctggaggacagagatttcgatatgccttccagtgtggaaaaagccagtgtctgcgcagaaaccggtcttcttcccagatccggatgcccgactatcacagagtattttgatatctccagtcttcccaccgaatactgtgatcagcatttctacggcagcagcgattacgatgaagaggactattataataacgaagatacggacgccgataccgatgcagcagctgaagcgattccaagcgcagctccggacagtactgacagcaccgacactgacaatactgacaattccgatgacggttccgataataccggtgatgatactgacaattccggaacagacgacaacaccggtggtgatgacggcagctatgataacagcaatgataccggtggcgatgacggcagctatgacaccggcgaagatccagtagaatattatgaatgatctccattataggtatctttcataaacaacatataaaaaaagtggtttcctgaaatatggaaaccactttttttacttttaataacttcttactgtctcgcagtttatcagttcaggcaagtcccacccaccgcttattacttttcgcaattgaagcaggggacttccctggttcggttaaagtaccatcttggctgcaccgtagattcctgcatcattgccaagtgtcgcgatcacgataggagtatccttgcaggattcaaaagcatactctctgtaatatttccggatacagtcaataagcggctgtccggccttggaaactcctccgccgataacaatggtctccggatctgtcacacagcaaataatggcaagagcaccacccagctgctctccgaccttttccatggttgctacagctaccggatcattctccttaaatgcgtccagaactgcttttgctgaaatctcttcggcatctctgagaacactgttctcaccggaagctgcaagctctttttttgccatgcggacaattccggtcgcagaagcatactgttccagacagcccctgtttccgcagttgcaggattctgtttcatgatgatccacattggcatgtccgatctcaccgccagctccgtgatgtccggtcacgatctttccatcaacaatgataccaccgcctacacctgttccaagtgtgaccatgatcacatcggaggagcctgctgcagcacccttccatgcctctcccaatgccgctacattggcgtcatttccagcttccgcatgaagacctgtaagttcttccatctctcccacaacgttcttatatccccagaagagatttactgcacgtgatacttcgcctttggagtttaccggtcccggaacaccgatcccgacgccttccacctcctctttggagatacccttttcttccatcttggcatttactgctgctgccacatcaggaaggatctgatctccattgttttctttacgggttggaatctcccatttctcaacaagagtaccatccgtacggaaaagtccgcattttacagttgttccacctacatcgattccaaaacaatatgttcccatttcttaccctctcttattcttcgtcatccggattttctctttttttcgcaagatttgcctgtacacgcttgtacagagcctctgccgcattgtatcccatcttcttctgtctgtgattgacagccgctgcctcaacgatgatcgccaggttacggcccggacggatcggaagagaatggcatactaccttatttccaaggtactctgtatactcctcatgcagtccaagacgatcgtattccttgtctctgttccactcctcaagcttgatcacaagatcgatggactgggtatccttaacgctctcaacaccgaacagtgtttttacatcgatgataccgataccacgaagttcgataaagtgacgtgtgatatccggcgcagatcccaccagtgttacgtcactgaccttacggatctcaacaacatcatcactgacaagacgatgacctctcttgatcagctccagggctgcctcactcttaccgataccgctctcacctgtgatcaggattccctcgccgtaaacatcaaccagcacaccatgaatagaaatacatggtgcaagctgcacgcccagccaacggatgatctctgccataaaactggaagttgttctttctgtcacgaatgtcggaacattatatttaacagccagatcgatcatgtcctgagacggacgggtcatggtactgaaaataacacatgggatcttgctggaaatgaaacgttcatatttaaaacgtctctcctcctcattaagctgcatcagatacgtatactctacatatccgatgatctgaactcgttcattggcaaaatgctccagatatccggtaagctgaagcgcaggtctgttgatctccgcagtcttgatcacgatgcctgacaggtcgatctccggagtcagattattaagctccagttcctgtaccatctttgtcaactgtacacccttcatacttttgtctccttttcgctgaaagtttgcattctcactgccgttttaccggggcgtgagacaccttatcttcaattatacacaatcactgctgaaactgcaatgcagcatcaggatttatgaaaaaattcatagacctgacgggcgcttctggcattcatgctctctgtctgtgccagttcttcctccgatgcatcccggatattttccacagatttaaatttacgcagaagggctttcctcctggtatcaccgatccccgggatatcatccaggatagaatggacctgttccctgctcctaagggaacgatggtattcaatggcaaaccgatgggcttcatcctggatcctggtaatcaggcggaagccttcgccggatgtgtcaatggggatctccacattgttgaaatacaggcctctcgtccgatgatgatcgtccttgaccataccgcagaccgggatgcttatcccaagctcattcagcaccttcagagcgatatttacctgccctcttccaccatccatcaggatcagatccggaagccttgcaaagctgtcaaattctccgttactctcatgagtgaaccttcgggtcagaacctcttccatgctggcataatcgttgggtccctgtacccatttgatcttgaacttacggtaatcactgcgtttgggacggcctttttcataaaccaccatggatcccacagactcaaatccactgatatttgaaatatcataggcttccatgcgcaccacatttttcaagcccagccattcttccacctcgtgaacagctccgatagttcgtccttcctcccgcctgatccgttctctgtccttggcaagtaccatacgggcattttccagggcaagctctaccagtttttccttggttcccttcttcgggacccggatgtgtaccttctgctttcttcttcctgacagccactcctcgatgatatctgcatcttcaatctcactttgcagcataatctcagatgggataaatggcgttcccgcataaaactgtttcagaaagctggaaaggacctgcgcctttgtatcaccctttgccacacggagataaaaatgatctctgccgatcagcctgccatcccggataaaaaacacctggacaaccgcatcctgatccctgaggtcttcactgtcatccatggctactgcaatgatgtctctgtcttcctgcccgtagccggtgatcttctgccgttccccgatcttccggatactgctgatcaggtcccggtattccatagcatcttcgtagcgcatttcctccgaagctttctgcattttttccatcagctcactaatggcgtcctgaaaatctccattcagaaatttgatcaccttattgatattcttccggtattcttcctggctgacatatccctggcagggtgccttgcactgcttcatatgatagtacagacagggccggtcctttccggtatctctcggaagactgcggttgcaggagcgtacctgatacagcttccgcactagttcgatcacgtcctttactgctccgccgcttgtataggggccaaaatatcttgccttgtcctttttcattctcctggcaaaaagcactctcgggtatggctcatgaactgtcaccttaataaacggatagctcttgtcatctttgagcatggtattatatttcggacgatgttccttgataagattacactccagcacaagggcttccagctccgaatccgtaataatgtactcaaatctggtaatatgtgtaaccatccgttcaatcttggcacctttattacgactgctctggaaatactggcgcacacgattcttcagactgatggcttttcccacatagatgatctcgtctttctcgccatgcatgatataaactcccggttttgccggaagcttctttaattcttcctcgattatgaacatactttattctcctgttttactattacagtaataagaaaaccgggatttctcccggttttcttatgatctgttttatgcctgtgatcccggcttttcttctgtttctgcatgatcactatctgttgtctgagcagattcttctgttttctccggtgcctgcatatcctctgtcagttcctgtccggatatctccggtctgaactgaaccgattctgtactttttgcagcctcgttattttccgcgatcatttcaatatcctgtttattggacacttctttttcatcctcggaaagtaccagatcatccagattctccgggatatccaggccctgctgaactgcacggaggatcttcatgaactctttgcctgtaatggtttccttgcggatcagatattccgcgatcttatccatctctgttctgtgacttccaaggatcctcttggcttcctcataggaatggtggagaagcttcatcacctcatgatcgatctctgttgcggtatcatcaccacagtttaaaactgctcttccgctgagatactggttctcctgtgcggcaagtcccatcagtccgaacttctcagacataccatactgtgtgatcatggctctggccaccttggtagcctgctcaatatcattggcagcacctgtagtaactgtgtcaaaaacgatctcctctgcagcacgtccgccaagatagcctaccagcatagcttccaattctttcttggtgttgagatatttttcttcctcaggtacctgcataacataacccagtgctcccatggtacggggtacgatggtgatcttctgtacaggctccgcatccttctggagtgcatttaccagtgcgtgtccgacttcatggtaggatacgatccggcgttcctgtttgcttaagatacggtccttcttctcttttcccaccagaactacttctacggattcttccaggtccttctgtgatacagctttacgtcccttcttgactgcaaggatcgcagcctcattgatcatattggcaagatcagagcctaccgcaccggaagttgcaagtgcaatagcttcaaaatcaacggtgtcatccagaagtacgttcttggcatgtaccttcagtatatccacccttcctttaagatccggtctgtcaacgatcacacgtctgtcaaaacgtcccggacggagaagagccggatcaagaacctccggtctgtttgtcgcagcaaggatcagaagtcccttggatgtatcaaagccatccatctccgcaagcagctggttcaatgtctgctcacgctcatcatttccgccgccatagcgggaatcacggcttttaccaatggcatcgatctcatcgataaatacgatacacggagcattcttcttggcttcctcgaaaaggtcacggacacgtgaggcacccacgcccacaaacatctccacaaattccgagccggaaagagagaagaacggtacctgcgcttcacctgcaactgccttggcaagtaatgtcttaccggttcccggagggcctacaagaagtgcgcccttaggcagcttggctccgatggctgtgtattttccggggttgtgaagaaaatccacaacttcctggagagattccttggcttcatcctgacctgccacatccttaaaggaaacgcccgtttcctgctgcacatatgccttggctttgctcttacctacgcccatgcccatgatcccgccgcctttgttcatgcggcgcatggagaacatcagaagtccgaacagaagcagtgtcggcagaaccacgctcaggatcattgcaacaaattcaccaaaaacatccggcggatcggtctcaaacttgattccctttccttccagtctcttggtaagtgctgtactgtcttcggtcttcgtggtgtaatagctcatatcctcgtacttggaattctttttcttgggtacgatcgtcaatgtactggactggatcgttacttccttaacctggtccttatccaccatatcgataaatttatcataggagatctcactgctgttatccttcagcatattggtaaacaacgcgaagcacaccaatgtgaccaggaggcatatcagaaaagccagaatcgactgatgatttttacctgatccctgcctgggatctttgttgtcaggtcgcttcccgtcctgatcattattcagttgattattcatttttttcctcctcttgtcatttctttattataaagagaaaaaccatataaatcaactgcgagattacaaaaataccatcgaaaaaacaccgcattggatattgccagtgaacgtaaagttgtagtatactgttcccagtgaattggaaaattaaagaggagaggaaatcagacaaatgaaaataggttttgataatgacaaatatctgaaaatgcagtcagaacacatccgtgaaagaatcggtcagttcggcaataagctttatcttgaattcggcggcaaactgtttgacgactaccatgcatcccgtgttcttccgggttttgaaccggacagcaagctccgcatgctgatgcagctttctgatcaggcggagatcgttattgttatcagtgccaatgacattgacaagaataaaatacgtggcgatcttgggatcacctatgacgaagatgtgctccgtcttatggatgagttttcaagccgtggcctgtatgtgggaagcgtatgcatcacacagtactccggccaggaaagtgccgatctcttcaaaaaacgtctggagaaactgggaatccgtgtctacaagctttacctgatccccggctatccaagcaacacttcctttattgtaagtgacgagggttatggaaagaatgattatattgaaactaccagacctctggtcgtgatcacagcaccgggaccaggaagtggaaagatggcaacctgcctttcccagctttaccacgaatacaaacgaggagtaaaagccggctatgcaaaatttgagaccttcccgatctggaatcttcctctgaaacatccggtaaaccttgcctacgaagctgccactgcggatctgaacgatgtcaacatgatcgacccgttccatctggaggcttacggcaaaactactgtcaactacaaccgtgacgtagaagttttccctgttgtacaggccatgtttgagaagatcatgggcagctgcccttataaatctccgacagatatgggtgtcaacatggcaggtaactgcatcgttgacgatgaagtatgccaggaggcttcccgccaggagatcatccgccgttattataagggcatgaacgctctggtttccggctccggcacagagaatgaggtacgtaagatcgagcttcttctccagcaagctcatgcagagatcactgaccgtaaggttgttccggctgccctcgaaaaagaaaaagcaaccaatggccctgccgccgctatggaacttcctgacggaaagatcgtatgcggaaaaacctccgatcttctcggcgcatccgctgcgcttcttctcaatgccctgaaagagctggcaggaatcgatcacgagcttcatgtgatctctccggatgccatccatccgatccagcagctgaagaccaaatatcttggaagcaaaaatccacgtcttcacattgatgagatcctgatcgccctttccatgagtgccgcaaccagcgatgccgcacgccttgccctggaacagatcccgaatctccgtggatgccaggctcatacttccgtaatgctttccgatgtggatgtgatcagcttccgtaagcttggtgttgagcttacctgcgaagccaaggctgagaaaaagaaagaatatcagaaagtctgatcttataaacaccaaaatcccctgtgccggatctacgtacaaacgccgaaccgtacaggggatttttttgagggaatctataatcaatcaacttgccgatattttcctatttaattcatcctatctttctgatagacaataccacctgttgtaaatttcacaacacttccgttttcgaccatatgaaaataaggttcacctttctgttctcctgaaaatattttctcaattccgtcacaatatatatttataatttccggagataacgcatactttttataacagtctttttctttttcgcagacatgagcaggaaaaacgctgcttactttttttctgattttcttcaattttaaaaggctttcatagtatacacgcaaagaagcagatggggcaagcggactttttccaggattcaaatgtccccacacttcccaggtgagcatgatatctcctgtaaaaagccatcctttcttctcctcaaacaatgcaatacaccccagggtatgactgggaacttccagaactttaagttttttatctcccagatcaaagatatccccatccctgactgtacagatttttcttgccggcccgggattccacatttcaaacgaaaatccctctttttcaggaatttcaaagaacatgagctcagacatttctctcagctcctggtctacgatctgatgggaaaaaggttcgtcataccttcccacacatacttcttcaaattgataatttcctgaattatgatccacatgagcatgagtatttacaacaatcagagatttttctccacaaagtttcaaaacttcttcttttaaatcggtaagtcccagtcccgtatccagaagaagagctctttctgttccatttatcacatacataaccgtcttatctatttcattgatcgcccacagatctttttccaacggaatgatcctgaataactgcatcttcattcctcctttattttacagctcccattgtcagtccgcttgtaatatatttttgtgcacagatgtaaaggataattgtgggaataatacacaaggtaagtcctgcaataaacagattccactgtgtgctggtagcacttctgaacatgaaaagatttaccgtcagcggtctcagttcactgtctccaatgagaatactgggaagcagaaagtcattccaggaccacataaaaaacaatacaccaatggtaaccgttgctggtttaacaagtggaaatacgatctgcgtcataattcgaaaaactccacatccatctattgcggctgcttcttccagctcccgaggtacatttttcaaaaatcccgtaaacgtcagaattccaaacgcacagaagaatccaatatcaagaatgataattcctccaagggaattggtaagattggtatttgtagcaagtacagaaataggaatcataactgcatgaaacggcacgatctgtccgaaaacaaaatacagatacagattctgtgagattttcccacgaagatgtgagattccgaaagcaccggcaaacgatacgaacagccctcccagcatagctcccaatgtaatcacaacagaattttttaatgcaactaaaaaattcatgctttccatggcatttttaaaattatcaagatataaagactttggtaatgccagaaaatcagccgcaatttccggacttgttttaattgaattcataacgatccacaataccggtaaaataaaaataaagcctaatataaacattgctgcggtacctgcaattttctttttccatgtcattatgactgcacctctctttttctagtaatattaagctgaatcaaggaaattgctgctatgatcaaaaacaggatcaccgatttcgcacagccataccccatattaaaagttccaaatgcgtcatcataaatattcatggcgatcgtctgtgttgtttttgaaggtccgccgccggttaaagcgtagttaatatcaaatgctttaaatgcatttgcaatagatacaaacagattgatcgtaatcgttggcatcagaagcggaagctggatttttataatacgattcagtcccacacatccgtcaatgcatgccgcttccatcacatcaagaggaatcgactgtaaacctgtgatgtaaaggatcatcaaaaatcccaggccctgccacacggtaaccactgataccgccgcaaatgctgccgttgaactcccgaaccagctaaaccctgttactgcttccgaatgtaaaagttctccaattattggcgttactttctgaaaaataaatgtccacgccagggcgatcataactccactgataatattcggaataaaaaagaacgcccggatcactggcttaccgaaaatatgtgtattcaacgccagagctataaaaaaagccagtacattggtcagaacaatcgtaaccactgcaagtttaaacgtcaaaaacatagattgtataaaatctctatcatgaaccaaatcgacaaagttttttattccgatccagttatgcgttcctttgatcagattccaactgaaaaacgaattcgggatcgttccaaaaattaacggtcctgccagcgcaaaagtataaatacacagtgccggcagcacaagaaggaaataatattttttctgttttctgtataaaatgtccgacatgtttcctacccccgtatatagcaggcggacttttaaaagtccgcctgttttcctgtgtgtttattcttctgcaagctttttaaatccttcatcaagagcatccagtgtctgatcttcatcggttattcctgcaaaatatccctgaacatcatcgcccagaacatcgcttgctccgcttggaagctgattccacaaagtacttctgacctttcctgcatccatatacgctttcagatctttataataatccttacttgcaatttcatcatctgcttcaatgtccatgcaagccataaagccgccgtagctattggtcactgttttcagccagtccccgccatctccgatataatcaagcacttccagggcttcatccaagtgttccccgtttgcgttggccacgatcgcatctgttgcacatgccacaacttctgcatcatctgcgttatcacttactggaactgcaaaaaatccgatgggaagatcctgtgttacacttcctacagaaatcgttgccgcatctgaaagaaagatcattgctgcttcctggtttgcaaatgcataaaatcctgtggccgcatccgaatccatataattctgtccggaattttctttcataagatccataaaatcaaagactctgtctacgccatccaccttaaagctcccttctcccttattcatggaatccagccagctgtcgatcttatcttttccaccaagtactcctccgaataaggagcagaattcctgacttactgtccagttatctttataaatagcggtaaatggtgtaatattcgcagcctgaagtttttcacagactgctttcatctcatcaaaagtttccggcactttttcaattcctgcttttttaaaaagatctttattataaagtacaccccaccattcatacatctgtggaaatccccacactttgccatcataagtaactgcttcttttgcattgtcataaagtttgtccacaaactcatgatcgcttacgtctgccagcaacccgttctgtgcaaaatcatatacctgagaataagaacttacttcaaaaagatccggcagatcttttgccgctgtctttgctccaagatactggttataatctccggactgcatctccacagataattttatattatcatgagtctgattaaacccttccgctgctttattgtaaatatccgcagctccggaagtccacactgccatcttgatctcaactacatcgtctacatttttcagattactttttgcgtaaaccggcatcactgttccaacaagccccattgccatgagcgctgccattgcgcacgctgtcacctttcttctcttcatttgtaaaccctccgttcttttttgatgaactcattatattataatttttaatatcaaaacagtgcacacttcttgacattatgtgtcacttttcataatatgtattggttttttttactcatcattatataataataccgaaaggaggggtaagaattgttttctattactgcaaaatttaaagaacactctataaaatttcgaattcttgtcatcgttcttccagttgtgattctcagttatatcattttattatcttctttttatatgatttatgtaaaagaatcccgtaacaatattcttctggaacatgaagagaatactctgtctatcgcaaaaaatacagccagttatttttcctcactgaactccaacattgatctgctgctttacggaacagaaattcagtctctgatccattcctatgcagataaaaagctcagtccggaagaagttcagtcccagtgtaacacccttttctccacatatcttttaggtgctcagtctaaaattcaacgggtttatattgttctgaccgataatgggatcatttccaatcagactatttataattccaccctggaacaacaggagcaaaaactggagcagctcagtgagtatctaaaacaaccaaagggaactctctgttattactattctccaaaggaaccttataacatcactgctgccaaaaatatttttgacattcagaaaccggaaaagaagatcggtattttactgactgagatcaatatccggtttatggaggatatgatcacggagcatcaggattctgaatatagttattattccctttttcaaaatagtgacctggtatatacaacttccccctatgccccatccgtcacagccagcatgaatatgaattatcactcccacagggggaatagtaatttttatgccatccgctattctgtaaacgatttcttacaaatcggagggcttctcaacacaaccggcgcatttcattcgatcaatcgtgtatggcgtcagctactggttatttccatattttttctcttgatactggttttcgctgttattcagatttcaagaaccatatcccgggaatttcaggtttttatcactaagttaaaacaaacttctgttgccgatgaaaccgccctgatccacacagtttccagcaacgaattttctgagctgacaaaggaatacaaccatatgctcctgcgccttcaggaatccggaaagaagatcacggaacaacagattcttctaaaaaacgcagagctgaaaacgcttcaggcacagatcaacccacattttctttacaataccctggactgtatctcaagcctggcatctcttggaaaaacagcgcaaatcacagatatcgttccaaaactggctgatatcatgcgaatgagcatcaaaggccctgatcttcttcctatttcagaagatcttaattacgtaagagaatatttggatattcagaaaatgcgtttccaggatcggcttctttttctgatcgaatgtaacgatcccatggaagatctgtatatcccaaaactgatcatacagccggtcgttgaaaacgctatcatacatggtatcagtgaatctgtggaaaatggctttctttctattcaattatttacttttaaagacgatgtactgatcaaagtctataacaccggccccctgttttctcaccaggtaattgaaaagattcactctgtatcacaaacttctttttccgaccagaaaagcattgggcttataaatattcagatgcggctacggtcccaattcggaaattcctatggactgcttcttgaaaatatggaagaccgtacttctgtatgtgttacgatccgtattccacaaatacatcaaagggaggacctgacaaaatgaaaattctgatcgttgatgatgaaaagatcatcctggaaaaacttaaaatgtatatttcacagatttttacagaaaaagagaatatttttacttctgacaatgcagcaaaagcactggagatcatatcctctcagcaaccagatatcattcttacggatatccgtatgccaggaaaagacggcctgtatatttcttctttcgtgcataataattttccagataagatcgtaatactgattaccggtttttctgatttcaagtatgcacagacagcgattaaaaaccatgttttcgattatatcctaaaaccagtagacgaaaacgtcctgaaagaatccgtattgaaagctatacatactatcaccgaacggaaaaatcaggcgatcatgcgcaaaaaatatgaatcctatctaaaagaaaatatcagaaatcttcaaaaagatttttttgaacggttacttttcaggaacaccacttccctttcttcttcttttcatgaagaagtcaccatgctccgcctggatcatattaaaagctattaccttttatactgcaaatgttctacaacagtttcaaaagatctggaaaaagaatattactttacgcatatcgccgaacattatcttcaggaacagattccgggagctcttattttttcttatggaaacgctttgtattccttatgtccggacattgatgaaaaacaacttacaaaaataactaatttcatacatggggaactaaaaaagaatcacgttctcatgtccgcagccatcagcagtcactctgagaatctgtctgaaattcccctgcttcgaagccagactgtagaaatttttaataccctgaaaaattccagtcattttgtcatgctctaccgtgatctggaaaccaaccccgttgctgtcatgtatgaaaaatccaactattttcaggttcttctcaattccctgtcttccggtgacaaaacaatgattcaaaggcattttgatgagatctcccagtttttcacccggcaaactcctgatgagttcaacagtttcatgtatagttttatgactctttttctttctttttttcagtcagcttccacggaactgtcagattcggtacgtcagatcaccaaaacacagaaagagcttttttcaacctcctcacttccggaaaaaaagactgaaatatttcaggactggatgtttcagattgcaggccttctgaatactgataaaattaataaaaacaactacctgaccagtcagctgattgaatatatccgcgcaaattatgaagaacctctgagcctatacagtatcgccgatgaatttaaccgaagtactccttatatcagcagactgatcaaacagacaaccggcaaaaattttacggatcttcttaccgatctgcgtatccagaaagctaaagaattgctgaaaacttcttcctatcacgtaaatgagatatcccacatggtaggatatcccaattttcgttacttcagccgtattttcaagcagcaaactggtatgactcccaatgattatcggaagatttcctgccgttttcactgaatttttatactgcttcccacaccatccccaacacattttttggtgacgatgatcttattttcgatccgttccttcagttctgacacatgtgagataattcctaccagacgttttccgtcggccagacttgtcagggctttcagggcctgttccagggattcctcatccaaggatccgaatccttcatctacaaacatggaatccagccggattccccctgcgcaggcctggatctcatcagacaggcccagtgcaagggacagagatgcctggaaggattccccaccggacaatgtctttacgcttcgttccgttccgttatagtgatcaatgacattcagatcaagacctgctttttctttctgatttttgctttgttcctggcgtttcagctcgtactgaccgctactcatggtcataagacggagattggctcttcgcaggatccggtcaaaatatgccatctggatatacgtttccaactcgatcttggattttccgttcagttttccgtttgctgtatccgaaagatttttcatccagacatattctttttccgccgcagtcatttccgtctgacgtacctgcactttctgatatatttcctcatttcccttctgaacagaaaaaagtgcttttcgtttttccgaaagctgtgttttctcttccctaaaacggctgtactgctctctgagcgcatcctcatctacttctccgatttcttttttctgctcctcaaagttttttacaaccgctgttattctttccttttccgcccggatctcctgtaatttctgttgagctcttctgctgctttctttcagctcttcatacagcttcctctgtgtttttatttcctgttccagagattcttttccaccttctccgatctcttcgttcagctcatccactttctgtgctttgttcttcctctctgtttccagacgtacgatgtcctgtgcagcttcattgataactcttcccagttctttcagagtcttttctctttctatgatcagcttctcaagatcctgtttctgttttgcttctttttcctttccctgaactttttctgacaggcagctgagcatatcctgtatctgtctttcaaatcctgcagctgtgttgtccgtcacttctccatttcctgccaccagacttttctgaatcagttttcggatctcttctgctgttatctgctgctgctttttgttttccacgtctcttgtctgaagaccggcctgttttctgtcacattgatttttctcttcctgtaactgaacgatctctgtttccagcttttcgatccacgtttctgtttcgttcttcttttttttacgttctattgctatgcgaatctcttcctcgctgtctgccagctgcttttcacattggtcctgtttttctttcagcaaagggatcagctttttccattccgtctcatgtaaaagctcttgtgcctccctctggatctgatgccataatgttttctggcgttcttttcgttttcctgcttccacactctgcgtatttgcgtcattctccagtctgtccagtttttgtttctctctgtccaggatttcctgatccacaacctgtcctttgggaagtattcccggacgcggatgctcgaaagaaccacataccgggcatgggcagccctctttcagttcctgcgccaggagccctgcctgcgcgtccagaaaactctgaaacagtttctggtaaacttctctctgcttttgtactttttcaatggaaatcttatatttttcctgctgctctttcgtggcattataagccccttgaaactccttaaccagagcaatcagtccttctaattctttctttttccgaagcccttctgtctttttcgtctctgccttctgaagttccagctccgcgctgtccaacagcgccttgtctttcttttgctgctccagctcttccttctgctgcgtttctttccggatgatttcttcctgccatccatctatctgtttctgttcttttttgatctcttcttccgtcagcagacagctgtcatagcttcgtttttcactgtccagtttatcgtactcaaacttgtatttttgtagttcttctcctgcatctgccagtattgaaaggcgttttttttcttcctcatcttttttctgcaaaagctgctcttcggaaatatccttctcttttttttcactgactgtttcaagctttccttcgattgtttccagctcttttttcagcttttccagctcctgatattttttcagcttttcttctttttcacggatcctgattccaagctcttcacatctgtgatctgcatctttatatttttccgcctcttctactgcaagctgtagaagtggtgttaattcttccagatctttttccgcttttttctttttcagctccagatttcgtttctgagccacaagattttgtgcctcttctgcttttcgtatatcctgattaagcgagtcttctttttcccggagctctttttcctgtgcttcaccatattccagaaactgcttcagaagttccagactccgctccagttttccctcgaattttatctttttcagttcgtcaaattcctctgcctcctgccatgaagcagtctccgttttcactccatccaaatactgggcaatactgcggcgcatttcatcatattccttatatctggctattgacgcatccttaagtttcatctgaatctgctgataaagtcctgtgtgaaagagctgtcggaagatctctcctctctgtgtagttcctgccagaagtaatttctggaaatccccttgggcgatcattgcgatctgtgtgaactgatcataactcagtcccagaagctgttccactgccgcagtaacatcttttgcctttgtcaccggctgacgttcatccggatagatcagctgtgcttcagcttttctaagagtctgtccggtgcctctttttttcggagccatatattccggactccggcgcacgtgataatttttcccctgataggaaaaaacaagctccacaaaggtctctgtggaaggctctgcatatttgctccgaaacatggccggatctcttacctctccactggctcttccatataacgcaaaggtgatcgcatcaaagatcgtggtttttcccgctccggtgtcaccggtgatcaggtagagacctccctctccaagctttgaaaaatcaatctctgttttgtccgcatagggcccgaaggcactgatggtcagtttttccggtctcattatttcacctcctggatcttacggatcaggtcttcggaatatttccgctgttcttcattcatgggctggttattctgcagttcaaaaaattcctcaaaatattccagctcagatttccttttcaccgtttctgtgcctgcgatctcctggttttctcttgtgcgtcggttatcatattccagcctcatcagattcggataaatagtacggagcttctgcattccatttacgatatcttcttcatctgtcagcgtgatctgcacataatcctctgtgtttgtgtcctgataaccggacagtgatgtgatttccatgtatgtgcccttcagttttcgcatatcccgttgaggcttcagcggaatctccctgatcttgagatttcctttttccagaagctccacaactgtcgcggatttctgctgtcctgcctcggaaaaagaatatttcaaaggagttccgcagtagcggatgtgctcgcttcccacattctgaggactgtggatatgaccaagtgccacatagtcaaaatcccggaacacatctgcctccacctggtcgatacctccaacggaaatctcttcagaatcgcagcgcattgcaccgaccacaaactgatgggcgatcagtacattgcgatgacgtttatcaatctccatatgtgcaactgccgcctgcacggcctcctggtaggtacggatctcatccacctcttcttctccttccagcccgtgcctcacagttgccggacgcacaaatggaagcagatggatccacacttctccatagctgtccgttaaacagtacttttctgtttttccatcgtataccggggtcatgcagatcccactgctactcatgatctgtgaaccgaaagcgatcctttccgcactgtcatgatttccgctgatggcatacaccggaatcttcctttctgccaactgcgtaagaaaccggtcaaaaagctgcacggcttccgcagacggaatcggtctgtcataaagatcccccgcaagaagaaccccgtccggtgcttctttatcaatgatcctcaggatttcattcaaaatatatttctgatcttcgatcatggaaaactcattgacacgttttcccaggtgaagatctgataaatggatcagtttcatcgatcacctgccactcaaaatgtgattaaacatactcacatcgagataatgcggattctcacgaataccgcttactgtttctttgtgtatgcttttgagtaaccggagttatctctactcacagatcctaagtacactccacagtcgttaattcccgaaatagccttcggtacatacttacgtttgcgggatcatgcaacttcgtaagtctctgcatctctcagattccgtgctgcattgagatctctgtcctcaatatatccacatgtgcatctgtagatcctgtctgaaagtttcagatcttttttaatacagctgcagcagtggcagatcctggaagatggataccatcggtcaactaccctcagttcgattccatattcagcacattttattttcaattttgtccggaattcatagaatttctgggacgcaactgcttttgagagatgccggttcttcatcatcccggatatgttcagatcctcgatcgttatatgagacggcttggttttcactatctcagatattaccttgttgatatgatctgtacggatattttctatccgatgatgaagtttctgtactttaagcttttgtttgcatatatttgctctttgagtggactctcctttctttaagttctcatatttacgggaaagctttcgctgtgcccgtcttaattgtttctcaagttttctgatccgtgctgttttattgatatttctgtatacagttccatttgacacaaccgcaaagtctttcagccccagatcgattccgatcccatcagtgaaatttccatctgcttccggagcaggtatatcgacaagtgcagacacataatatctgcctgctttcatggaaactgccccgcttcggatcacatatccatccttagaagccggaatgtaacctttttctttcagccttacccagccaagtgttgggatcttgatcctgtgacgttcacagagacagtctttgggattattctttacaaaatacatttttacatcagatcttccttttttcttatatctcgggaaactagtctgatgatgaaaaaatcttgaaaaagcggtacaggcattttcgattgcattctttaccgatttggaactgacttctctgatccagaaatattccggatgccctggaaggtattcattgttcagccatacactgaacgacttgccgctcataaatctttcaccggcatcataacgttctttattatgaaacaggtagaaattataaatatatctgcatgtgccgattgtcttatgtattttgatcttctgctcttctgtaggatcgatctctgtcttgaagctcttcagcaatctcctcatccttttctatctgttttttatacttacgaagtccatataatctacaggaaaacacatgaaggatggaaataatatcctgtacaagttcttcctgtggtgacagttcttcattgttcaccaccagtatcgttgtgtggaatctcatgcagaatctttcaaaccattcgtatccaaaacggataaatctgtctttatgcgtgatcactatggttttgaccttctgctccatgacttcgtccagtaatccattccatttcctgcggttataatcaagtccgcttccatagtcttcaatgcactggtctacgatcattcctctggcattacagaactgacgcagaaatgctgtctgattttgaagatcatccctttggtttttggtagatactcttgcataaataacaacttttcgtttatcatgttctatatttatacctttaaattgaagatactggtcatatgtgtaataacgcctgtctgttggagttcggtttgcttttaagattccctctctgtcccatctctgaagcgtttttacagaaacacctaataattcagcaaaatcttttggtttataatttgtgatatttgatgtgttcataatatacctccataagtacatttaaacacatttaatatctttttacaatatatttagttacttatatcatcctcctgcactcacccagcctccgaacagttccggtgcaaggtcgatctcacaggcatccagtacatcttttagctgtgaaggattgctgacaccggttacaggcacagtctggaatggctgatggaaaaagtatgccaaagacagggcctgcaggctgtggccggtttctttctgcagctttaacagcttctgataggtacgaagatttgtctcgttccagtaggatcttttcatactttctgaaagacctgtgatctgtgtttccttctcccgcatccaggatgcatccacctctgcatctgtaaaggaaagccccattttctgaagttttgaaaaaaatcccattgcagtggaagaaaacggaacggaagcagcgcctgtctcacagtgccactgatattcttccctggaaaactccacaagtgtaggatccggatttgtatttcctccgggattgattcctgcaagactccactgattggatactgctgtgatccctgaaagatttcgttctctcagacactgagcaatttctttcagcctctctgtgcggtaattggaaaatccataataacggatccggccttcttttttcaattcttccagaatatccacgatttcctctacctgtttctccggatcatctctgtgaagccagtaaaaatccatctcatcttttcccagtgtgcggcagctctcatccaggtccatgcggatatcttctttgttcactctgctgcggcccggatcctcaaaggaatagtgcgcgcccttcgttgccacaataacttttccctgcatgccactctctttcagccattttcctatgatctgctcactgcagtttccatgtccttttagccatttgcaatagacatttgccgtatcaataaaatttccgcctgcccatacaaaggcattcagaatctcaaagcttttttccaggtctgatttatctccaaatcctgctgttccgaggcagataggactgatgttcagatctgtattgttcagctgtatatatttcatctacgtaacctcccgtattcatatatatctttttctattataacttttttccgtagatccgaacagtatatttcccaactatccatatactatggcacaaaaaaatcctccggcacatgcatgccggaggatttgatattccgttatcttaacaatatgatttatttgtaaagtggtccgtagttcttgcaagcgcggaagtctgcaccctctttttccataccgaatgcgttccaagctgccggacgatagatatccttctcaggaacattgtgcatggataccgggattctcagcatagagcacattgtgatcaggtctgcaccgatgtgtccgtaggagatcgcaccgtggttagcaccccagttgttcattacatcgtaagctgttttgaacggtccctctttgccatcgcatcttggagcgaaccatgtacatggccatgtgtaatctgtacgtttccagagcttgtcagatacctcttccggaagggctactgtccatccctctgcgatctgaagaaccggtccaagtccttttacaaggttcagacggatcatagttgcaggcatctgagcacgtgtctcataacggctggagtatccgcctccacggaagtatccgttgtcggccatacaccactctgtattgtccatgattgctttctggtctgcctctgtaacatcccaccactgtttcataactggtgttccgtcagcctctttagcctgtccgttagcatccagacaagcagcaccggagttgatcagatgaaggaatccgccagcttctttggcaacaccctcaaggtcatatcctgtagctttcttaactgcctccgggctccagtatgtacgaacatcagcgaagatctgagcacgtcctgtaagaagtttcatgaacagcattccaagtccgttgagaacgtcgttctctgtagcaaggatgtacggctcacgagcgccattccagtcgaaggatgtgttcagcatagcctctgcgaagtcaccgttcggatagaagtctgtccactgtctctggccctggaatccagctgcaagagcattgtgtccgattgcttcctcggagaattccggagcaagattatcacagccgttcatcagctctttgatgataactgccatcttaacaacaaactcgaactgctcctctttcttctctggtgagaactgaagctcttccgggttcttgtcccagccgatcttgcaggtctcttttgcccatttgagagctttctcaaactcttcgtgatcgtagataccctctgtcatacgacggatgatctctacctcatcaacagactcaactctcattccgagataggactcgatgaaatcagaatcgatgatagatccgccaatacccattgttacagaaccgatctgcaggtaggatttacctctcatggatgcagctgcaactgctgcacgaccgaatcttaacagtttctctttaacgtcttccggaatggatgtgtcgtcagcttcctgaacgtcatgtccgtagataccgaatgctggaaggcccttctgtgcatgtgtagcaagaacggatgccagatatacagcaccaggtctctctgttccgttgaatccccatacagccttgatggtctgtggatccatatccatggtctcagctccgtagcaccagcatggtgtaactgtaagagtgatatctacaccctctttacggaatttatccgcacatgcagcgctctcaccaacacgtccgatggtggtatcagcaataacaacttttacaggctcaccatttgaatatttcaggttctcctcgaaaagctttgctgcggatttggccatgttcatagtctgatcttccagagatcctcttacatcgagggctcctctacgtccgtcgatggttggtctgataccgataaccggatagctgcctactaatctgctctttgccatagtaacaattacctcctaaatttatattcactattataacttactgtttttttacgttccaacaactcctgtctgaactatgcttttattatacgattgcatcttttaaattacttgtgttataatagcaaaaaacagtacaatattcactttttcatatgagttcctaaaaaaactataaaatttaagaaagaagggttgtattttgcacgatcttggaagaaatgaggacagacttcgaggtacctatgaatttccttttgaattccaccacattgacagcagccatccacgctatgtcatgtcctaccactggcatgtagaatgtgaaatcatgcgtgtattacagggcactctcaccgtcactttagacgaaaaaagttttacagcaaaagccggagatgtgatttttgtcaatagtggagttctgcattccggaattcctcaggattgtatctatcagtgcattgtttttgatatgaacatgtttctgaaatttaattccgtctgcacagaatatatgcagaagatcagccaccaggagcttctgatctatcaccatttcactgaaaagcagcctgatatccagagagcagtgaactctctttttgattctttctggcagaagaagccaggatatgagctggttgtgtttggacaattttaccactttttcggattggtttttggtaatcattactacctggaaagcctgcggaaaaccagacgagattacaagcgcattgtccagctgaagcaggtcgtggaatttattgaaaagaactatgccagccccattaccctgcaggagctttccgcttcggtttccatgtctcccaaatatttctgccggttcttttccgagatgacgcatcagacaccaatggattacctcaaccgccagaggatcgagcaggcctgctgccagctggctaccaccgatgattccatcacggagattgcctatcggaatggctttaatgatctgagctattttatccgtaccttcaaaaagtacaaggggatcacccccggcaaatataaaagacgctgaaatatttttccacgtcttaatggcacatatcagagtattacatgacaaaaagcaggatctcgcacatattgcggatatcctgctttttgaggaattgggctgttttatgtaaatacagctttttcggcctggcggagaacagtcatgccggaacggattcccgttttgcagacgggctatgttcatgtctttatgaatacatgctactcttctgtatgagaaaaaaagccggcagggcagattttctgcatgaaaaagccgacgcagatcgtgaaggagcctgatctctgttcacgcagtgaccagcaccagattatgtcttaattgaaagcggatacgatcatccacctcactgcttgcttctgaccaacggatatctcacacagtcggtccatctactcgaagggattccactgctgcatagaactctgcttgcgaaatgcctgtacgctgcaccggaacgtgcagcagaatatgatacagttaaaaacgatccggccgcactatagccgccggatgtttcctgcttgtcttattctaacaaatgcctctttaaaatgcaagaaatttcagaacatttcgctcttcattttccgacagcaaaagtctctttcctacagatttttcaccgcgtctataaacctttttccgtatttttcgtacttgtgcctgccgactcctgtcacattcagcatttcctcctcgtttccgggcttcagaatgcacatatggataagggttttgtcggaaaagaccatataaggggggattttttcctctctggcaatctccaggcgaagagcacggagcttctgaaaaagaggctcatcctgttctcccagctccccgactgcagatttcggaagtctgctccgtttctcttttttcttcgtctccagctcttttgacattttcattgtgaggatatgcgcctcctccagaagtgacctggaagcggcggtcagcttcacaatcgtatatccgtcatccgtcagatgaagatattccttcagtaccagataattaaagatctgccgcagccggtgtgccggaatctttgcacagactccatattccggatttccatccatctcatactgccggatcttcgccgtagatgcgccgcgcagagtatccaggatcacgttcaccccgtatctctgaccactgctttccacgcaccggatcattgccctggcctcctggctcacatcctgctcttcaaactcggtctggcagttcaggcagtttccgcagtagctttttccgtattccccaaaatatttcaggatgtactcacgcagacaatcatgggtaaagcagtaaaaggtcatctgcttcagcctctcctgatcacgctcccggacaaggcgccaggctgccgcttccatttcctggttatcctgtcctctctcgataagatactgattggtaaccacatccttcccgctgtaaagcaggatacattccgcaggatcgccgtcacggcccgcacggcctgcttcctgataatagccttccatgttcttcggcatattataatgaatgacataacgcacatcggacttgtcgattcccattccaaatgcattggtggctaccatcacacgacagcggtcataaataaaatcatcctgattgttccggcgttcctcatcggaaagtcctgcatgatatctggtggccgtgatgccgtcacggatcagctttccgcagacctcctccaccagctttctggtgagacagtagatgattccactgtcgtccggatgctccagtatgtaatcgtgtacttccttatatttatctttcggtgttttcactgcaaaataaaggttttcccggtcaaatcctgtggttgtgcaaaagggattctgaagccccagaagtcttgcaatatcctctctgacctccttcgtggctgtagctgtaaatgcaccgatcaccggtctttttggaagctgtgccacaaactctgcgatcttcagatagcttggccgaaaatcctgtccccactgtgatacacagtgtgactcatccactgcgatcatggaaatatccgcgctcagcgcaaaatccagaaacgcctctgtggtaagcctctccggtgctacatagatgatcggatatcgtcctgcctttgcatagcgcaaggctgtgaaatactgcccctgcgtcagagagctgttgaggtatgctgctgagataccgacctggttcaggcttctcacctgatccttcataagggagatcaacggtgatattaccagtgtgatccccttcatcatcagcgccggtacctgatagcagatggattttcctgcgccggttggcatcactgccagaacatcttttcctgcaagaagcgcgtcgatcaccgcttcctgcccttctctgaaagtatcatacccgaagtgggtctttaaaagttcctgtttcgtcataaatcgacatgatcctttctgttacgttcccaccggaactgtaacgcttctctttttcattgtcgaatcgctgctgttttccgaatattttattttaacatatttacagataaattgccaattgatacaaaaaaatcacaaagcacttcctccctggtttcctgttataatgatataagagaaagagtctgtttatactgttccgcagcagaggaccatgaattcatggagtacccgggcctctgttcagtaacagccggtatgctcataaaaaaaggagggtttgttatgtgtaaaagaaaaataaaaaccatcgaagcaatttttttcctgtttcttttttccgttattgtgctcctgcttccccaggatgcccacgccagagtccgggtcgtgaccaaaggaaccacttccactatccgtgataccgacggtgtgatcgaagatgagtcttcagacattaatttcccgatcaacatcaaaaatgcaaactgccaaaaacggatctatgccgtgacagtccgtgtaagcttttattcacccaagggagtcatcccaaaaagcaccacattttctatcgatgggatcaatgtggttaagctgaacacttcaaattatacaccgctggcatacaaggaaacctttttcacctacgatgacaacatagaggatggctacctggagttcgatttcggcaataaaaaatgtccggtaccggtagactgtgactatgaggttaccatcaaacaggcagtgcctgaaatttttatcaccaacaacaattatctgaaccagaacatccgaaccggaaaaaccacttccattggaattgagatttctgatccctatgtaaaaaccatcagcaaatcaaaattcaaggttacttcttccaacagctctgttctcaaggtacagagcatcactcaggattccaaaaaacgcagccgtttcacagtcaccctgaaggctctcaaagccggatccgcaaagatcactttatcctacccaaaggccacagcctataagctgaccggaaaagtaacctcgccttcaaaaaacgtagcaaccttccgtgcttccaaaactacactcaaggttggctccaaggtcagcatgcgttcccttatcaatctgaagggcggtaccagtctgaccatcaaaaatgcaaaatccagcaagccttccgtacttgccatttccggaaactatcttgtcccaaagaaaaaagggtcagccacggttaccgcaaatttaaacgatgtcaatcgtaagatcactattaccgtatccgcaccggccgccaaacctaccgtcaaaaatctgaagatcagtgttgccggtatcaagtatggccccaatgacatgaagacctattataccttaaaattcaccaatacttctgcgaaaaccatcaccaccgcaaaagtaaagatcaccaccggttccggtatctatgaccagatgtactggaccaaaaatctgacactgaacctgaagcccggaaaaaccatgaaaaaaacctatttcatccagaacatggtccaggcaccggaaaaaaatgatatttccgttaaatgcctgaagattagctggaagtaaatacttcaaaagggacgtgccgcagtattgatttaaaaatcatcactgcaacacgtcccttgtatttattctctctgagctgtctatacgttttgtttttatcctgtatcctacagtacctcattcagtacctgcagtccatactctgcaaggctgttatcctcttcgccggtaccaccgctgataccgagaccgccgatgatggtgtctccaaccttcaggggtacaccgcctccgaatatcacaatattgtcactcatttttccaagaccataaaatgtctgacccggctgtgtcagtctggaaagctccatggtggacatcttcactgccacagatgtatatgccttttttacggccatatcaaagcttacaagaaaagatccatccatcacatgaaccgcaaccggatttccatccgggctgcataccgcaattacagaaggcttgtttcttctcaaagcttcctgctcgatcttctcgataagcctcttggcagaatccaatgtgatacgaccctggatacccatacgcttcagcacttcctggatcatcgccgtgtttgctgccatactgtcattctgtgccattgccgtatttcctcccactgctgtcgtcacagtcccattctgcacatcaaaagcctgtacatcccttttctgcaccatctgcgaatcctgtgctcttacatccaccgccgatgtacccgctgcaacatccgcactacttccaacagttcctacagcctctaccccaacattagctacaatcccagcagtttctgctttcacagattcctgaacactttcagaaatatctgtcttcttctcttcaatcttcgctgcatacacataccttgccaacacataaaaataatctgacagacggttcatatatttcttggctccggtatccgatccaaacttcacactgaccagcgcaagctctctctcagccctccgcgccacagctcttgtcacatcgatctcagccgcaactcgggaatcccccggaagaatcggaagcctctctccggaaaaaatctctttcatccggccaatctcctcctccagaagctccgtccggtcttcactgaccttaaactcccgattataaggatcagaaaccccatctatgatcttcttcaaagtctccgagatcttctccagcatccggacaacatccacatcatcaatcagaacccgcacaagcccaatatgactcatcagctcctcaactgaccccatcagacaaatccgatcatccgactttgaaacattcttcgtatgggaaagatccgtcatccccttatcaccatacccggtataaacctccatcccagctcaacctcccagcaactcctgataaataatcccacccatatcagaccaattttacaatcctcgaaatgctacgcataccacacatacgtaaacacacaccacaatcatcccggcaaatcaggcgcggcgttcacaaacgcgccagcctccgtcaaaacgtcacacattcaaggcgcccacggcgccccatcggcacaacgttcaacccggaacaaccgcagcatacaggcacaagtcaatacccttccgcccgccacagtcaagcactctaaaaaaagcccgaggggtgtgcagaggggccgcggctttgcggcccctttgcggttttcatcttttatcaaaaagaccaaagtttagtataaatcttaacaatatcctctttcttcggtacacgcggatttgccgctgtgcaggcatccgcaagtgccatatccgccatcttatcaaccgccgcaaaataagcatccggtgtgatcgtcttcatctcttcgatggtaagcgggatattcatctctttctgcataaactggatccagtttacaagagatcttacgctcataacttcgttataattgctcagtccaagaagatgtgcaatattggaatatctctttactgccggaagatattctttctggcttctgctgcgtttgttgatatttgcattatattcaacaatatgcggcaacagcatcgcattagctcttccgtgaggaatatggaaaatagcacccagctgatgagccatactgtgagtaattccaagacctgctgcattgaaggaaagtcctgccagacaggacgctacatgcatcttctgtcttgcatgcatatcattaccgtcaacatatgcacgataaagatatacgccacagatctcgattgctttctctgcaagtgcagatgtaaactcattatggttgatgctgacataagactcaattgcatgagtcagaacatccatacctgtatctgctgtaatcgcaggcggaacactgcgtacaagctccgcatccagaattgcctcatcagcggtcaggctgtctgagatcagcggatacttcacatgtgcttctgtatcatttacaactgcaaaagaagtaacctcggaaccggtaccacttgttgtaggaatggcaaccagtccgacttttccgtaattattgatcttcagggcaaactcacggattgccttggaagagtcgatggcagaaccaccacctactgcaacaatagcttccggctgatactgaaggaatttcttaactccttcggcaatttttccaaccggtgcatccggaacaacatcacagaaaatatcaaattcttttccacctgcctgaagcggttttgtgatcatatcgatcattccgctttttacaacaaacgggtctgtgataacaaggactcttttgtatggaatatctctcagtcttcccagggcatcagctccaaaatggatggctgttttcatttcaaatgtattcatagaaactgctccctctcgtcataccgaaacacaggtctcttttgtctgcctgtggccggataaagtaaagcggatctccgcattccgcatacactgcatgctcatgaacacaatcgttttccgatatatgtccaacctatttcgggtagatgcattcgatcttatgcgcgctgaaatgcttcagccacttttcagacggctttttgtctgtgatgaccgtctcgatatcccgcagctgtcctgccacggaaaaagcagtctgatcaaatttcgtgctgtctaccaccagaatacgcatttttccggaattgatcatggctttttttgttgttccaaaggcttctttggattccatgattcccagatcctcatttaatgctttacaggaaaaaataaccttgtccacataataagagcggatcacttcctcggttctggcacccaggaatgcaagatacccttccttcatcactccaccggtggaaataatattccagccggatacatccgagagttccaaaaggatctccatagaattggtaacaacggtaagacgttccttttctttcagagccttggccacaaaaactgccgttgtgctggcatccagaaaaatgtgatctccgtcattcaccatggaagcagcaatctccgccattttctgctttccctgtacattctggtttttacgaatattaaatggtaaatcaataccgacatcttcgttgatcaccgcaccgccataactctttgtggcaagtccctctttttccagcttgtccagatcacggcggatggtttcttctgagacactgtaaagctggcttagttcacttacaacaacccttttctcttcctgtaatttctcgagaatcagatttcttctctctaatgctagcataagatgcctccttttcagatgtcattgcagggatacccttcaaaaggatatccctcagatataaagacaatattaaaggatcgtatcgatcattctcttgtccggatgagcgatcactgaggaatccatgtacattcctttttcagctaccagctcttttgctctttcgatagaagcctctactgcagaaacctcgccggtaaggagcatgtaagatttaccgcacatacccttggcgatacgaagctcgatcagatcaacgatagctgtcttagctgcctgatctgctgcctcgatgatagatgctgcatcataggtctcaagaattcccagggcactgatctcctcgacctgtgtggttccgtagattgccgggaaaatggactcatgtggattgcccagtacaaaactgtcaatacatttgtcctcgtatgttgttacagctgtgtctacagcagcttttactgcgcttaaatctccggtgataattgcaatatattttcccggacatactgtctgcgcctccacgatctctacttcagatgtcttaaccatggcatctgctgcagtgataccagctggtgtggttttaaactcaatcattccgattgctctactcattttgtgcacgtcctttctaatttcttgcaattacaacatggcggtctgtcacttctgtaaccttaccgctgatggttgcatggattccgacacttaatccctgtgcaggctgtgcgatcatctggccttctgttaccatatcgcctacatttacgattgcctgtgccggtgcaccgatatgctggcttaagagaacctttaccttcgatacgtttacaagttcttcctgaagcggtgcatccttgtcatatctggtaagtcccagacgtgccatcagacgctcctcaggaaccttgcggtattctctggactcctgaaccggcttcggctgaacaccctgaggtggtctgattccggccttacgaagtccgcccttcatatctgcaagcagtgttctcggagccaggctctgcggacacgcatacatctcgcagacgccacaggagctgcagaatgcagaattgatataaggattcacatttctgaaatcctgattggatgctgccatcatgaacattgccggatcgatcgggtgtcccagattgtgtctcgggcaaagatctgtacatgtatggcagtggcagcagatggatgctgctctcttcagatctatagaagaagtccgctgcttcttcatgacaataacatggtcctttggaagaaccaggattgcgttcgttgtttttgtaaccggatcagaaccgtttccgatacgtcccatcatcgggccgcctacgaaatatacaggatctttcacagttgttccgcctgcctgggcaacaacctcttccagtgtgcatcccagtggaactttcactgtaacaggattctcaacttctgcaacaacggaaacatatttgcttgtaaccggtttgtgttcttctaccgcgcggtatacattgtagagtgtctctacattgaatacggctactccctgctcgattggcagtcctcctggccgtaccacacgtccggttgcctcataaataagaacaacctcatcacccatcggataaacctcatccagaagatggatcttaaccctcgggaattcttcaatatgctgatttaaagcattgatcgtctgtacataagactttttgattccgataatggcctgggaagctcctaccgtctccgcaaccatatcgaatgttttcatgatctcatatgcgtgcttttccaacaactgtctgtgaagtttcagtaatggttcgcactctgcacagttcataagaatggtatccgctttgtctgtcagtttcatgtatgtagggaaacctgcaccacctgctccgacaacaccattctcctgcataattttctgtaattctttgatatccatggcgttactccaatcctgcaccgtcatctacgattccgacgattgcggcatctaccggtgctgtttctacgccgcagcctattcttgctgcgcttccttgtgccaccaatacatactcgccgattcccgcaccgatgatatcgatggcaacaatctggctgtgctcggctttcatatgatgcaccggctctacaatcatgaatttatttcctatgagtttttcactttttcgtgtggaaacaatgcttccaactactttgcctacgatcatatgagcctccgtttttctccatatcctctgttagggatgccagaaagtggcatccccaaaggaggaatattatttgattatggtaactgtattgcctgtggcaattcttgctgcatttgcttcatctgtatcaatatgcatttccagtgtaaagctgtcatctacacggatcttaacctgattaaagattgttccgcgctcattgtccgctttaacagaaacaatatcaccatcatgtacacccgcagcctgggcatccttcggagccatatgaatgtgacgcatggccacaatacatccctctttcagataaatagcacctttcggtccgacaatggcgatcggcgcgcttccggcaaggtcaccggacatacgtaccggaaccttcattcccagcttgatcgcatctgttgcggaaacctcaacctgagatttgctgcggacaggtccgaggattcttacattctcgatcgcacggagcttcagtcctacgatggtaactgtttcattggatgcaaactgtccgcccatcagatcttttttcttggtaagctgataaccttctccgaacagtgcctccacatgctcctgtgtcaggtgaatatgtcttgcggaaactccgataggtacaacaaaaccattgcccttgtcttcgtttttgttgatcgcatcgatcaccatttttgtgatcatttcaatattattcgtttccaagagtacacctgctttctttcggtctcataactgaaaactgaaaagcaccggccagaagccttaatggcccttcggccggtgcgtatcagtaagaatcagttgaaattatttaagaaccggaaggattttctcaacatctgtatgaggtctcgggattacgtgtgtagctacaagctctccaagtctggatgctgctgcgcttccgctctctactgcagatttaactgctcctacatctccacgaaccataactgttacaagaccggaaccgatcttctctgttcctaccagagcaacgttagctgctttacacatctggtcagctgcctcgatagctgctgtaagtcctcttgtctcaaccattcctaatgcttcctgtgtcatgatcatatcctccttgtggattataaatgctttatttgttctgtttacttttgactattttggtgcaacagcttattttttgctgctgtttttgctttccagtgcttcttccggattttcctgctgtctctttttccatcggcttgcactcagctcaaccagtttgacgatttcctcgtggggattggcaattaccgcatagctggcaggcttcttgatagcctgctctactgctgcattgacagctgctgtaactgctgatacatcgccttgtacgatcagggtcaccagtcgtccgcccagcttacgctcccatgacgccagctcaacgtctgccgttttgcacatgatgtccagggcattgatcgccgcaactacaccagtgatttctataaatccatatgattttcccatgagcgaactccttaactaatttctattcctcacaaagcctgaatcagagctttggaaggattttctctacgtctgtatgaggtctcgggatcacgtgtgtagctacaagctctccaagtctggatgctgctgcgcttccgctctctactgctgcttttacagcgcctacgtctccacgaaccataacagttacaagaccggaaccgatcttctctgttcctaccagagcaacctctgctgcttttgtcattgcatctgctgcctcgatcgcagctgtgaggcctcttgtctcaaccattcctaatgcttcctgtgccatgattctatcctcctgaatcttatcttcgttacatttttatcatatatgattccgccacttttgtaaagtgaacttcggaatcctcttaatctttatccagggcgctgattttcagcattttctgtgtacctggttccgggttggggattatgtaatgctgtaccacgcctgtcatgctctctgcgactttcatgccggcttctaccgctgccgtgacatctgacacgcttccgcggtacttgatgcagacaagaagcggtactggcaggctgtccgcattcgccggtttattcttatcgaatacctccaggtggacatttgcagccttgcacccggcgtcagctgccacaaaggctgtcgcaagtccgaagacctccagaattcctacagcttctgccatgttgcttctcctttcccgttaaggttatttgttaacaatcgcgatcttaagacctgtcattgccaggtttgtctcaagtgcctcgttgatctcctcaagcgggaacttgtgtgtgatcagctcagacattggaagtccgattgcttttgctctcttaaggaaatcaaatgttgttgcatagtctctgaggttgtatacccaggaaccaacaaggttgatctctttggagcagaggtcgaagtgcgggttgatggtagcgtctccaccgttgatgaagaaaccaagctcgcaaagaccgccgccgttgcggataaatttgtagatgttggagtgtgcatgaggatttccagtacactggaaagcgaaatctgcaagatgtccgccctgagcctctttaacagcctcagtaagtgcctcaatgcccttgaagttcatgaagttaacggttgtgtttgctcccattctcttggcaaactcaagacgtttctcatttccgtctactgcacagatattatgaacgcccattgtatggagaactgcgatgcagataagaccgatcggtccgcaaccctgaacaacaactctgctgttgaatttcaggattcctgttgtttttgctctctctacagcatgtacaagtactgcacatggctcgatgaggatacgggaatcaagatccaggtcacttacattaaagaatgtagaaccgaattttccgcctctgatgaagatgtaatcagcgaaccagccgttgaatttaacgtcgtcatccggaagaagtccatatacgtcagcgccgcctacgttcttcttgttaaggtcgaacattgtgatttccggatcatctttgaagatcatacaggtaacgatcttgtcgccgactttaaccggtttaccagctgtatcaactttaacgtttttacccatttttacgatctcaccggttccctcatgtccgagaactactgggataagaccaaacgggtcatttttgtactcatgagcatctgttccgcagacgccgcagccctcaactttaacgaggatgtcgtcgtcaccaacttctggaagatcatactcctgaagctcaaaatgtttcttctctgtcatcattgctactcttgcttttttcggaattgtgtttcctgccggagcagccggagcgcttgttgcagcagctgctgcaggagcgtttcctgtcatgccggagagaacctgtttaacgatttcttcgatatttacattgttcatatccattgtttctgttcctcctgattaacgaatgcaaaggctgtctgtcattacgcagcgtcttctctttgtgaatgtgcttgcgcttgtaagtccctcaccggtacggcttgcaatggtgaatgtacagaaaccttctccgccaaatccaagtgcggaataggacgggccgttctttacaaggattgcggtatcaattgctttcgcatattttgtaatgttatcaatattcttggaatgaatatgtgcggaatgacggttgccatgctcaagccatacagcctgctctacagcatcgtcaaaatccttagctcttacgattccgaggattggcatcataagctctgttgtgatgagcggatgttccttcggtccttcgaagataatgcagcgggtatttgccggtgcctgaactccgatcatggaaagaagtgtcttcgcgtcacgtcctacacatttacggttcagcttgccacctgcaagtacagtctcaacaagtttgtcctgctcttccttggatgcaagatagcagtcattctctgtgatcatgtagtgcattaactcatcaactacggaagatactgcaacaacttccttctcagcgatacatggaagattgttatcgaatgtacatccgtttacgatatcctgagctgccttacggatatcagcagtatcatcaaccagtgccggtgggttacctgctcctgcaccgattcctctcttaccggaggaaagaactgctgttacaacaccagggccgcctgttgctgcgatcagatggatatctttatgtttcatcataatattgctggtctcaagtgttggtttctcaactgtgacagcgatattatccgggccgcctgattccagggaagcctcatttaaaagattgattgcgtaaatagaagttttaactgctgccggatgtgggttgaatactactgtatttccgcctgccagcatacccattgtgttgcagagaactgtttcactcgggttagtacatggtgtgatcgcgccgataacaccaaacggtcccatctcgatcagagtcagtcctctgtctccggaccatgcagttgttgtaatgtcttctgttccaggtgtcttgtctgctaccaggtgatgcttcaggatcttatctcctacattacccataccagtttcctcaacacccatacgtgccagtacttccgcattttctttgatcttcttgcggatgcaggtgatgatcttttctctctggtccatagacattgtcttaactaccaactgagccttcttggctgcttcgatagcatcattcatatccttgaaaacgccatgttttccggccggagcatctgcgatctgcatttttgccataacttcctgtacaatttcctgtaccatattctcacttattggcatgagatgtcctccttaatattccgtcaaaaaattatttcaggccaagctgagccataacctgttttgtgatctgagcaacaagctctgcgtcattctttgctgtatctgctgcaggagctgcatctttatcacaatcacagtcttttccaacgaaatcatactgatatcctgggaactgtttgtagtcctcgctgtggcatgcaccgccgcagttgtggcagttcttgccgtctttgttcaggcagaggcttgccggatgttttccaggcataccgaatttacgacggatcgcatagagcttctcgatgttctctttgtcaaattccttcggtccgccaaggagcttggtctgatacagaagctgtgcatagaactctacagactccatcttcatatatgcagcgttaaggtctgtgctccatgtaagtgctccgtggttctcaagaagtactgcatcgaagtatggaaggtatttctcaaggttgtccggaatctccattgtggaaggtgtgccgtactcagcgatcggaacacatccaagagcgataactgcctcaggcatgatcggctgtgtaagcgggatacctgcgattgcgaaagatgtagcatagattggatgagcatgtacaacagatcctacgtccggtctcttctcatatactctcatatgcatcttgatctcagatgatggtttgaatcccgggttagcctggatcacattacccttgccatctactttacagatgaactctggtgtcatgaatcctttggatacaccagttggtgtgcaaagatattcattctcagctatcttaacagaaaagtttccgtcgttagctgcaaccatgttacggttgtagattctcttaccgatgtcacaaagctgttttttgatttcaaactcgtttaccatgcttaatttcctccttgagcattggattgcactattttgtttctgagaacattttaccccataccacaaaataagtcaaggacaatccgttgttttatgttggtttcttgttgtattttgtgttgtttttattgttttttatattttctgtttgtaaaggatcttttttctgtaatcctgtatctctcagccgccgatctggcagtccaggctgcataccgcatgcactgcattctttaacatctgcatatgttctgctgtaggcggaaggattccttccattaaatagggtctgccaagtccttcatatttatcctgccccagtctgtggtacggaagaagatggatcttgtttacgcccggaagggatgctgcaaatcttgcgatcgcctggatctcttccacagaatcattaaatgtggggatcaccggaacgcggatcaccagtctggtttttccgtagagcgcaacccttcttgcattctccagcatcagtccgttggcccgtcctgtaaattctttatgtttttcctgatccatatgcttgatatccatcagatatacatccagatagggaagtacctgttcaatcttttcccatggggcacaggccatactttctaccgctgtgttgattcctctctcctttgccgcgcgaagaagatctctggaaaagtccgcctggcacatacattcccccccggaaagggtgatcccgcctccggaacggtaataataggcacggtctttttccacctcttcgatcatctcacgaactgtcacgtcgcggccgatcactttatcttctcccagaaccttcatgttctggatccggtattcctgtgattccggattacagcaccagcggcagcgaagaacgcagcccttcaggaacacgatggtacggatacccggtccatcgtgtactgaatatttctgaacatcaaagatcctgccctttgtatccaaatagtccattcgttactcctttagaagccctgctcagtacgtctgatgatatcgtcctgcagagatctggaaagtgtagtgaacaatgcgctgtagcctgcaacacgtacaaccagatgtttgtacttctccggatgcttctgtgcatccagaagtgtttctctgtcaacaacgttaaactgcatatgcatacccttctgatcaaaatatccgcggatcagtgctacgaatttctccagtccttctcttcctgcaagtgctgacggatggaatttctgattaaacagtgttccgttggatacgataaaatgatccaggcgggatacagaagttgccgcagctgtcggtcccttcacatccttgccggctgacggggaaacgccatctgctaccggagtatgtgcgtaacggccatccggtgttgcaccggtctgtccgccaagcggaacgtttgcagatacaggataaagtcctgcctgataatgtccgcctcttgggttcatatatttctgaagcggtcttgtgtaagtataagccacatcccttgcaaagtagtccacatccgggatatcatttccaaacttcggaacctcctcgatcatcttgtggatctcttcgaatcttgcctttttctccggagatggctctgttccgagagctgctgtcataacagctgttgcggtctgctcatttacgctgatgccattctcctgaagcttctgcataacgatggtggtgatatctgctgcagactgtgcatcgatacccttgccatagttccatgccagagcctccttcagctcttccatggtcatcttcttttcttcatatacaagcttgcggatcgcatacagagaatctgccatgtttgcaataccaaatccctgaggacctgtaaagttataaacagctccgccttcctgaacggatttgccccgtttcaggcagtcatccaccatacaggaaaggaatggaagcggacatctctccgcatgtgccacatcaatggcattatcagcatttacaagcagggaaatgaaatattccatctgtttcttatatgcatcatagaactcatcgaagctcttcatctctgtgacatcgccggtctggacactgatctgtacccctttgtccataccattagagaaaaccatctccagcggacggcacatgttaaagaacgcagcgtcatgccagccctctgtcttacctgccttctgcggttctacacagccgatgatgttatattctctggcatctgcaagagaaaggccgcggttctgcagtgcaggaatgataacctcatcattgtaataagccggaagtccgattcctgttcttgtaagctctgcagccttgatcaggaattcatgtggtgatccgttccatactcttacagaaagagacggtgccggaaggtgcacatgcatagacgcctggatgcacataaaggagagatcattggtcacatcctcgccatccttgttctgaccacctgcgatcaggttctggaaaaggctgtagcctgcaaagccttctgcagatgcagcatcacggcatttattcaggtcgtttaattttacccatatgcagtccatcagttcctgggcaaattctctggtaagattgcctgcttccatatcactcttgtaatacggatacatatactggtcaaaacgtcccggagaaatagaatgtccgctgctttccatctggatcagctgctgtacaaaccagaaggactggcacgcctcatagaagttacgggcgcccttcgccggtacgcgtgtacaattggatgcgatctgaaggagttcctgttttctggtcggatcctgacactgatatgccatctgctctgcgagctcggcatagcgatgtgcatagtcgataactgcctgacagctcatgataactgcttccaggaaacgagatttctttgcgtaatcaccatctcctacattacactcatccagttccttctgagctttggcaatgatcccttcataaccgatcgccagaacttcttcatatttaacggttacgtgtcctacaccattgtagaaatagtttccgggtgtaaaaatattgtggtcaatggcaagaatcgcttccggtgccatgtaggaggttgcaagctcactggtagtcttgcctttccagtatttatgtacctcacggagctccgccttggtttcctccgcaatataaaatggatcggctgttctggtagccactgtatccagctcatcctccagccactggaaagaatactccggaaacgtctgacatcctctcggcgccaaagtgctgcttccaacgatcagctcctcatcacggatgatgatcggaatgttgtgcaggatgtgggcaaatgccttggctctacgggtgatgatcggctcgtcttctgttgctttgtaagactctgtgatcagttttgctctggcagattcgatcaccggcatctttgcataaagattatctacaagatgtgtgatcctgtctgttttcggaacatctgctatatgaaatttctccatgattctcctttctcataaccggttgtttctgatgatctgtctgcctctacgcttccagaaccgctcctgtccggctatgtgctcatgtagttttattataccttacccctacttcgatgtcaacgaaatccaacatgtgtttctagctgtttttgtggtttttatcggttgcgccctgttgattttatttgttttttgtatttttatgtttttctctattgactttgtttttctgctctgccatacttggatttatataggaattcctttgtttttcagaaaaaatttatgcaaagtggacattcgtattccgctctgtcacatgttctcaaacagtaaaagaggtgtatttttatgtatctttctgatatgcatacccactccatcgccagtggtcacggcacggaatgtaccatcacaaacatggcacgcgcagctgccgagaaaggtctccggcttctcgggatcactgatcacggtcccggcactctggcagccggaacttcctcctatttccgcagccttacctattctcccaaaaaacatttcggtgtagaattactctacggaattgaactgaatatccttgaccgcagcggaacggtagatttagatcaggaattattatgtaaacttgattacgccattgccagcatgcatgcctggaattaccgctgcggtaccagagccgaaaacacagaagcttttatcaatgtaatgaaaaacccctgtgtaaagatcctcggacatagtgataacactcattacccggttaattatgatgcgcttgcaagggctgccagggaaaccggcacgatctttgagatcaacgaagcttctcttgcaccttatggctatcgtggcgacacaagagaaaactgtttcgagatccttcgatgttgccgcaaatatgatctgccgctgcttctttccagtgacagccatggcccggagcatatcggagattttacctgtgctgctgagtttgttcatcaggccatgtttccggaacagctgatcctcaacaaccagattcccagactcaaggtttttctccaaaccagagaatgatcttctgtatcttttccgacagataacagatattgtcccccaaaacaaaacaggccagttcaaacacaggaatatacattttcctgtatctgaactggcctgtttttatttttcccgctgcttccgtacaatttccgcaagctcgctatatttacctgtaacatatccaaaattttctcttctgtgaggaagcttgcattcggtgcaatctttgatcccgctttccgtaaagcggaaattaccaccacatttatctcccagtgcatataaaggacaatagcagaacagacaattgaagttctccggatctgctcctttatggcacggaaaatactcacagtttttgtggctgaagtaagagtattctttgccttcccagtatggtttctccatggctcttttctcctctcctgacatccacacataattttttcctataaaaaagaggtagcgatgccaccccggggtagaaatataatccgttcatgagtgcgcggagggaacgaatgtatccggagtagtatcgcctgccatttaatcatgtataattcatatgaacaggcgcattccataaaaaaatgcctactctcgtaaaaaagtagacaacgtcccaggggtgcggagtccctgaaatggttgttacactttacacggaagtttaacctcgccataacaagcaggtttcctggctccgggatcatgactcctctctccttctcatacatacgtacaatggactatgagattcgctcctccgttacagtgaccggatcgctcaggtttcacacctgattcccttttctgtggacttctgataatcaatatataactgtcagctatcctcagcacttgctatgttcaatatggaattatactgacattataataacatcctgttaattatatgtcaatactgttttcaatatttatacatttttgagcatattttgttgctgttcactccgttccatgggttttcaatattttttccgacgtcaaaaacagcccgacaaactgctgtcgggctgctgtatttttattttctgttgtacgttcttattatacaagacgtcttacagatacaattgttctgtatgtagcatcattgctgatcttgatcccgtcctgagagttcgatgcatgaacgatctggccattacccatgtaaatagccacgtgtccgccatagcagatcagatctcccggctgtgcatctgcgtaggatacttctgtacctgcattctgctgctcataggaggttctcggaagactgactccgaagttcgcatagacactctgtacaaatccggagcagtctgcaccattggtaaggcttgttccaccccatacgtaaggatttcccacaaactgtgtagcataattcacaacagaagatccggaaccgctactgtaagaagaactgtcactgtctgaagatgtatcctctgcattagatgtgtcctctgcactttcttcagatgcgtctgtgctgttatcgtaatctgcgtctgcattatcctctgtattctcagtatcctcggacgcatcatcattctcaccattgtctgcatcttcatccacatcctcggtgtcatcttctgcagtatcctcatctgcattctcgatcacgtcgccgtcctcatcgtactgtccgtcttcgctctcgtctgcctcatcctgctgtgcttcctgctctgcctggcgtcttgcttcctcttctgcctcagcctgtgctctcgctgctgcttcagcctcggcctgacgtcttgcctcttcctctgctgcaatacgctcagcctctaatctctgaagctctgcagtctgctctgcaagaaggtttgcataatctgtagcctgctgctgtgcgtaggcgatctcattatcataatctgcggatgtggcacgcttctcatccagctgtgcctgcaggttctgggactctgcctcatattcctgcttcattccctccagctctgccttctcctgtgtgtactgtgcctccaggtttgccacctgctggatcgtattggaatatttttcaagactcttacggtcctgctcataagtcttctgtgtgtactctgctcttgtaagaaggtcagacaggttctctgcattcagcatcatctggaaccatgcatcgtctccacccttctcatagagatactggatacgtttcttcattgcctcatactgtttctgcttggcatttttggccttctcaaggttggtctgtgtagatgcaatgtcggcttccttattggagatatctccctccagtgtctggatcgaaaccatcacgtttacaagattggcatcaagagttgaaatctcgccttcaatctgtgacttctgtgaggaaagctcatccaatctggaataagtcgcattcagctgttcgttagtcgcatccatctcctgctgaagtgctgcctcatcttctcttgttgcgcttacgctgactacctgtgctccgctgatgatgagcgccagtgtcagacataatatccttttcttcatgactgttcaccctcgcaatctgattctaatttaatacagcggatctgaccatccgcttcgttggttttctttgtaatacttttgcaatatcttgtttcaatctttttatatattaacacagtgttatttggattgcaaggattttctattaattagtttaaaactttgtaacatttattaatgattttgacattaaaaaaggagaacccgggttatctcagattctcctctcgcgtttcttattgctatttgttacatataaatttctttcagcatatcctgatcagaaaagatctgcaaggatctgattggctgtcttgttcagatatccgttgggatcggaaagagtgcttctgttccatctgaagtatgcaccgtttcggatatagttaccactggattcatgatagtcatatttgctggctccaggatacctggacatgtaagtttctgccagcttgatcgcctggcttccgtaagttccgcttggtgtcggtgttccggaaatctgtacgccggcattcggtgtacagtggaggatcacgacactcttatcggaacactgtccgagaacgatccaggtatgtccgctgttgtatccgatatctcccggataaagcttccagtttgagcttgccagctgagcctgggaaacaacggtacccattcccttgccggaatacaaagatccaagatttccggaaacatccgtgtacataggtccaccggatctgctctgcatgatctgatatacagaccatcctacaaagccggagcagtcaaggcccttctgttctgtagcttcactgagatccatataatatctgtaattataggagctggaattgctgtcataccattgtttccattttggactgatgccctttctggtcgcatccgaccagttgtggccgccgccccatacgtaaagagtctttcctaccggaagtaatgcattggcaaggaaattcttgatagtcctggagcttgtcgctgtagtagtacttgggttggtatccaagacaccattgctgccaaatgtatacttcttgccatcgatcgtcttcgttcccgtagccatgacaccggttgacggatcgaaataatatttatatccttttttggaatttgtgacccaaccggtagccatcacgccgctcttgctgtaaaaataataggtatcgctgccgatcttcttgaagcccttatacatagctcccgtgtttggatcaaaataacgcttctgctgtttcttattcgttgcccagccctttgccataaagcatttgctggtaaaatatctggtcacattcttcttgtctgtaaggaatacacttctggctgcagcaccactgcctctgtaaaaataatatttcttattactgatcgtggcccatttcgttgtcatatatccgctggtgggattaaaatagcgggtattgttcttactgtctgtaagccagcctgttgccatatagcccttggcaccgttgacattataaaaatatcgtttgcccttggaatccttagcccaacgcttcatctgcacgcctgtggatttattaaaaaaatatttcttcccgttcagtgtaagccagccttttaccttctgtccattctgataataataggactttcctttttctgttttaaagccgtttttggtcgcagcctgtacatctgttgccgttgtatgtacagttgctccggctgcaaagaacatcagaacaaaaaaaagtccccagagtttccattttctgcttaattttcgcatacataccttcctttgatagatagatcattgatatttactatttcttaagtccgactgatcgtaaacgttacaattttgttacaattttacgtccatattatataacattctttacggtccgtcaactctttccttttctttcagaaaaatcatcatccaggtattaccaatgttgattttatgcagaaaaaagccccgaaacatcagaaatattcactgatgctccggggatatgatcttttatgcagttttgctcctgtctgttacagatctgttacagatccttacaggaattttttgcgaagctctgctccgtcaagggcacttaaatatgcaggtgcaacatcaaatacagtcttgcagcccttctgtccttcctggttcatgcggtatgcagctcttgcataggcaacgatcacagaagatgtgaactcaggattggaatccagcttcaggctgtactcgatcacatggctgttctcattgttccagcctgtttttccgctgcggatcacaaaaccgccgtgtgggataccgctgtggtcacgattcagctcttcctgggaaatgaaatgtaccgttgtatcatactcgtcaaagtagttcggcatggtcttgatctcttcctcgatgcgtgcaagatcagcaccttcctcagcaactacgaagcactctcttgtatgtttctggcgtgtagtaagctccggattttctccgtttcttactgcctcaagtgcagcttctaccggaatggtgtactgctttgcatcctttacgcctttgatgcggcggactgcatcagaatgtccctggctgacacccttgccccagaatgtgtagtcgtttccatttgtaaggatcgcatttgcatacatacggttcagagaaaacattcctggatcccagcctacggaaatgattcctacatgtccactctctgctgctgccttgtcaacatttgcaaaatgctccgggattttcttatgtgtatcaaagctgtccacaacattgaaatattttacatactccggtgtctgaacaggaagatctgtcgcacttcctccacagatgatcaggacatcgatctcatccttcagcttctccgcatcttttacagaataaacctttgcggtctctgtaaggatctttacagtctctggatcacgtctggtaaatactgcaaccagctctgtatccggattatgcttgatggcgcactccacgccgcgtcccaggtttccgtaacctaaaataccaattcttatactcataacgatttcctcctctttttctctgcagtatgacattttccggacagcattgtgaatttctgtcagaaaaatccctctgcgatctatatcgcaaaacggatctgcaggatccgccttacaaacatatggatatgctgcctcaggatattccgattctcaattccgggatatcgatgaccgctttgttcctgcatcagcagcagaaaaagccgcccggccagcacatgaaacaggccatggtcctgcagcaggcatcacacatatccccttctgcagtcggcattcccccaaagggatcctgccgctgctgataccagccgccaccgccttccattctctggagcagcatacggtactgcatattatccggttcctgacggactgcttcacggatctgatccagagctgttacattatttcccattcccatatttgccatagcagccaggtaataccattccccatttttctgaccaagagaatccagtacattcatagcttcctgaaaatgaccgctctgcacataattggcggccgcccttctgcgcatactttcctcatcctgataggcactggaaccggcatttccgtaatttccaaaaccaccgtaatttccgtagccgccatagccattctgggaactacttccgtactcacgctctttcatgatctgctcgtaagcctgctgcacttctttgaatttttcttcggcctgatccttattcggattattgatattggcatccgggtgatactttcggctcagcttccggtatgccttttttatttcatcatcagatgcgtttctgggaactcccagcacgctgtatggatctaacattttttctctttctcccgttcttccctgcgcttctgtccgatcgccgcaaagcggcaccagacgccggaatataaaatatttcgaaggatatctccgtatcggaggatcggcagcttttcaaattctctgcagcattctgcaagcatcatcataagaagccgacgtacctcttcctcgaacccttctatcttatatttttcaaggaaaggattgtaatttccgttttctgcatctttttccacatcgtcataagcatccaggatgtagataaattttccgagataaaatcccagacggcgcagggacgattcccagacatccttacggaaggccagaatctcttccatgatacgtccggaacacccagctacacggtccacatcggtttccccctgtttttccagggaagaaagctcctccagcgcgtttcggatcctttggattttctccggataagcggacatatgcatatttccgcaattcttcagaattcctgcatatgcatagcgcagtggtttgtgttcatcctgccagtcatccatacatttgtaataggtaaggatcacattcatatccgcacagtactcagttactgtatttttacgtaccggctggggcttcagcggatggaccacacacctggaggttcccttcttcgttggcggctcataaaggccgcttaaaagaaggaccacaaatgtcatatcataagtcagtgagatctgtcccggtatcccgtatctctcccgcaattctctgcaaagaccgcagtaaaaagaacggtacacatcaaaatccttgaattttatttccggtttattaacggtcacatatccgaacatgtcagctcctttttacgaattttgtgtggcatttcggacattcgatctcgatcttgccctttccctttggaatacgtatcttctgtccgcagcccggacagctgtagatgtgatgggtctttctctgcttcatcagatccttttctttattaaagcgaaaacggaactttgacgtcatctgaaggaatttctgattttcggcataacgctgctggatatttctggaaaaaatacgtatatatgcatatacgatcgctgcgaccccgagaatgtcaagggtgctgccgacagttctgctgaatatattggcaaacattgccagaatgatcagaaccagtgcgactcccatgatgaacctggaaaaatcatccactccataacgtccctgcataaatttattgaatttgtctctcatatgatctgcatctccttttcactgccagacggcactgccccaaaatttccgtaaaaaaatccggatggcagttcctaacggtcattgcatacctggaaaatgtagaatttcagataataggactcatctgctgaccagaggatcggatgatccggtgcctgtgtacggtactctacctggcgcagtctcttatggacattcttcgctgcctgaccgatggtctgtgtaaacagctcatacgtcataaaatgagagcaggaacaggttgcgagaaatccgccgtcctttacaagacgcattgcacggagattgatctcacggtatcccttgatggcattttttacagagcttctggatttcgtaaatgccggaggatccagtaccacaacatcaaatttctctcccttctcctcaagctcaggaagaagctcaaaaacatcctcacagaggaatttcactgttccgtccaggccgttcagactggcgtttcttcttgcctgcaggactgcagtttccgacgcatccacaccgagaacactctgtgcccctgcaattcccgcattcagggcaaaagagccggtatgtgtaaagcagtccagaaccttcgcccccttgcagagcttctggatagcaagacggttatatttctgatccaggaaaaatccggtcttctgcccgtccctgatatctacttcatatttcacaccgttctcttcaatctgaacaagtgtcggaaattcttctccgataaatcccttggtaagttccattccttcctggcggcgtacctttgcatcacttcgctcatagactccacggatccggatcccatcctcagcaaggacttccttcagtgcatctaggatcgtttctttaagacggtcgattcccagtgcaagagactgtacaacaagcacatctgaaaacttatccacaacaagccccggaagaaagtctgcttctccgaagatcacacgacagcttccggtatctactaccttcttacgatactcccatgcgtcgcggacacgttgtttcaaaaattccggactgatctctgtacgctcatctctggtaagcatacggactgtgatcttggaattggtgttgataaatcctcttcccatcggatatccgtcaaagtcccggaccagaacgatatctccgttcacaaaacttcccatgatgcttgcgatctcattgtcatatacccagaggcctcctgatttcaggaatctgccttcgcctttttttaatgttactactgccaggctcataaattctaccttttccctttctcgtttccctatcacggtttgcgatgtatgagtccacaaaaccgatttacggtcaattttatcacagaaaaatccatttttccagtgcttacacaaatccttgtcgtaaatcacaaaattttcatgatatctttccggcacgacaaaaaataccgcagcagaggttgttttctctgctgcggtattttttatctcattttctgtaaatcttttattctgctgcggattcctcagaagagtccgtgttctcgccgtaaagacctgccagatatttcatggtttctttataaagtgtctgcttatcttcctggggaacatctgcaagaatagctgctgtcacgtctgtggcctctgtgtcctcctgggaactgtcaatactgaacagcttcttcagcttctgatccatcatattcagctctgtactctgatatttttctgtaccatctgcctcataggattctgtaccatccttcaggatatcataataatccttctcaacagtttctgccacactcttcgctgtctgctcatccagtgttaccgttgccactgtatcctccgttgcagcgagaagggaatctgcatctccctcatactcgccttttacaaagaggacaaatttgtcataattgttctttgcttcttcgctgagcacggaagtatcgttttctgcactgtctgcctggtctgagccctctgtactttctgaagattctgtatcttctgttgcctccgggattccggtcttatcggatgcagcctcgtcagaagcactttcatctgtgctgctctcgtcagatgcactatcctctgtgctgttctcgtcagaggtactttcgtctgtgctgctttcgtccgagctttcctcattgctataggttccgtcgtcggtagcatccgggattccggtctcattgcttgtatcctgagaatctgctcctgtttcttcctcaagacccggatcctctgtggagctctggatcacatcgtcaccaagaatgctgtcatttacattgttgacgatatcatcagaagaatctgcatccacatctacggtttcatcactgctctcgccatccagcgtatcatcagaggaagaggtctggcctgtggtattggcatctacctgctccagtgtttccttcacatcatcataattgtaatcctgctgtgagatctgcttcagaagagacacgatcctgtcaatatcgtcctggcttacggaaatattgttctgctcagccacattgattacaatattctgaatctcatctgcattctgtactccgttctggatcacatccatcttggactggtttacaactgttgtcgcctcatttttaccaaccttatctgcaagctcaccagtggttacgatctcctggttggcaagcttcgtcttggtctcatccagcttctctccgctggccttctcatatgccatctggataccggtaagtgcacctgttccggatacttccatcgggcaggcagcaactacttcacagttcttcacaccggatgtggaaagtgtcgttgcgatcatattacctgtcacccagttcagatttgctgtgcggaccttgatcccgccggactgtgtaggcttcacataggcacagctcaaagttctggaaccgatctgggactgtggtgcgatattatccaggtgtttatgctcatcctcatttgtaatggtcatcacctgcacctgatcggaacttacattaaaatatttcatcattgtctgcttctgggcatccgtaagatctgctccaagtgttactaccttcgatgcatctgcaaatacgggatttacacttcctgccacaaggcatgcactacagagcagagctgcgatcatgtttctttttttcattgatcttccctccatatattttttcggatcgattgtatctgcttaacttttgcggtgtaaagcggacattcctcttcgttacttacatctccacgaatgcgagcgcttcacgatctgtcgttcttgtcatattataacacagctgctgaaatatttgtaatttatattatataaaaaacgctgccggaaattatatcactcatttctgacagcgttttattgcttttctcattttcccagagaacttatctgatctggtttaattttccggtttcttttgcttttttcaataattcccggtttttttcattcatgataccaaaatccttcagcggacagtacactttttcacattttcccatgaactccagtgcttcttcaaaggcagactccgaaatgcattcaaaaggcttctccgtgatcacttttgcagccagttcttttgccacctgataatctgcatcattggtatggagaactccggtcacaaaaggaatcccctgtcgctgcagcttccgatataccggaatcccacttccatttcctccgatcacaaacacctccggttttccggccggaggttccatttccacgcagccgaattctgcattatagcttccacgggtgatgccataaagcttccgaatataatcggaagtaaagatttcctccggtgcaccatatttctcaatgtgatctccatgaacacagatcacctggtcagaaatcttctgggcaagatccagctcatgaagggacatgatcaccgtcatctgtttttccaataccatcttcttcaaaatggcaagaagctccaacttatgccggatatccaggaaggaggtcggttcatccaggataatgatctccggttcctggcagatggcgcgtgccagaaggatacgctgtctctgtccgtcactgatagctgtaaaatcccggtccttcagatcccaggcgtgaaccatctccatggcacttttaactttttccttgtcctctgcggaaaggatcccgagagttccggtatagggatatcgtccggtggataccacatcctcacaggtcataagctccggtcgcatgcgctcggtaagtactacagccagtttttttgacacttccctgttggtcatccggctcatctgttcctgttccagatataccgttccgctgatcagggaaagctgtcttgtgatactcttcaaaatagtagattttccggcaccgttgggaccgatcagtgtcaggatctctcctttattcagctgaatattgatctctttgatcagcggttttccatcatagcctacggtcagctgatctgtataaaaaaaatatgatttcatcgtttatatcctctgctgtctgcgaatcatgatatagataactaccggtgctccgaaaactgctgtcacagaactgatactcagctccgtcggtgcaaatacagttcttgcgatcaggtcacagaacaggcagaacactgcaccgcccagaaaacaggccgggatcacaagcaggggtttggcagtcttcaggagactttttgcaatatgaggcacagcgatccccacgaaggagatcggccctgcaaaagcagtcacacaggcagaaagaatactggaaagcaggatcagaagtatccggaaagccttgatattaactcccatattctgcgcgtaagtctcccccagctgataggcgctgatcggttttgacataaaaaatacgatcaccatggtaagaagtaccacagcagccatagtctgcacattcccccaggtcataccggaaaagcttcccagtgaccagttgtgaagattgactatgttggaatcatctgcaaaggtcaccacaaagtctgtgatggccgaacagatatagccgatcataacgccactgatgaccagcatggacatgttgtggactttttttgccacaaggagcacaaagcccatggagatcattgagcctgcaaaagcagccaggatcatggcaccggaaccgatggacaccgatctgcttaaaaaaaagatcatcagaagcgccacgatcagcttggcaccggaagagattcccaatacaaagggtcccgcgatagggttgttaaaaaaggtctgcagcaaaaatccggaaacagaaagtgctccgccaaggatgatcactgccagtatcctgggaagacggatctcccagacgatattataagaagtttcatctccctgatgccggaatatgatattcaggatctccttcacagagaggtggatacttccggaatttacattccatataaataaaaagattaaaagtaccgcaaggatcacaaaagagatcccgtatcggactgcgcgttttctgtcattcattttttctggtacactcctcttctgttttgttatcctgtcctttcgtttcctgctcacaggtggaaactggcaaaggagttaaagcgaacactggaatttattttagtttatgcatataggtcagctcatccagagaatcatcgtctgtagtcagcatggtgtggatatcctcaatcatggttccaagtccggtggtttcctggaagagatttttgcctgtgcaccagacatttccgttcttcactgccttgaaatctgcaagaagcttacttttggaaagaagctcatcaatggtcttaagttccccgtcaatcgtactgttatagatgatatagtctgcatccttcgccttggcataaaactcttccatctgcatattcatggtggaaagagcattgtcatttactcccgtatcctccggaacataatttcctcctgcgagagagatcatttccgaaacatagtcgccactttttcttatatttaccgcacctacggagttgatataaaagaacgctacggtcttgtctgttttatctgctgtgagaaccttatccagcttgtccgtctgctctttgaaaaccttttctgctacatcttcttttcccagaagaactgcgtaaagcttcatccactcggtccttccaagaggatgactctcatagctggaacgctctaccattacagggatcccgaactgctccagcttctcctgtacctccggattgtgatggatcatggtggattcaatggcaaggtcacagccctcgttcaggatcagctcgtaatccggagcactgtacttgccggcataaatcatctttttctgttccatggcgtcctttgcttcctggatataccatccgtcttccttggttccggaaagcttgatgctgtcaatcccgtcgatagcgcggaaaagatccatggccgaggttgctaccagatagatattgtttatgggctgctgcagaaccgcaatgtcaggatccagcccctccggtgctttcttgccttcgggaactacaagaaactgtccttcctgatcaatggtgagcagcgcatagccatcgttgtagtaatccacattaaattcctttgcgtaggaaagatccatactgtggtcaaaggtaaggcctggaatatccgcaggcttatgttctgtctctgctgcctgcactgcaaaagcacaccccaggatcagggtcagcgtcagaaatatgtatgaaattatttttttcatttttcttcctttttcatgctcgaagaatcaaaattcagggtatactcaatctcgtgaggagtactcatggctacagtatctgcagtcacttccatttctgcgtcaaagactgtgaccgggatctcaaatgtggagtttccgtctttgttcaccggctcatatttttcgccgtccacgatcatgtaatcataattcggactgctccagatgatggttgccgtagcttctttgtccttgatctctactttagccggagattctacagatgctcttcctgttccgcctgtaagggttacatccgtctcataggttccgtcctccagcttcagctcttccggttttttcccttcggattttttgtcgtcagaggtttttacaggattctttacgctgactttatggtcgtaccatttgcctttttctcccaggatcgccacgttaaattcctcaccaatggccggtaccgggatatcaaatccgtaaacctcctctgtataaccatcgctgtacttcactgtatctgtggtcggctcaatgatctctgctccgtccttctgggcatcctcggcagttcccgcaaacaggttaacgatcttcttggaaaccagacttacgtggatggtcattttaccatctttgaccgtgagctctccttttttgtcattggcctcatttacatgaaacatgctgctgtctgtaccaaactctgctgtataaacgccatcttccagggtatctgctttggctgcatctgtatccttttcttcggaagcttctgcttcctcaccggactctgtttttgtttcatctgtttttgccatcgcaggcacagagcccagcaccaggactgatgcacttgccattgcaagaattaagtttacatagcgttttttcatgataatcttctcccttccatagatacagcaatctgcccggaaaacagtcttcctgatctttccgggcagttacattgatttcttataggtatctgaactcactcagatatttttatatttattattctgcggactcctcagcagaatcagcctctgtatctgctgctgcatcagaatctgcggactcctcagtgcttcccagagaatcgatggctgcctttgtatgctctacataaagcttctcaactgcttcgattcttccaagaccctcgatctggcagtcaaccttatcgaagtttccggatgctacaaactggctcttccaggaatcctcctcatcaccggccatatcgttatttgcatggtctccggcaacaaccatcagcggacgaagaacaacgttcttgtatcctgcttcttttaccttctcgataaccttgtcgcaggctgtatcttccggcttaccctctacagtaccgatgaatgcgttcttcaatccaaggttttccatctgtgtctgcatctgatcgtatgtaacgttagctgtatgagatgttccatgtcccatgaatacgaatgctgtgccagcctcagctgctgcatccatgctgtcaaatccggcctctttgcaagccgtatctgtgatcgcctgagcaacggctttcttgtcatcattgatcacagttgcatcgtctccaacctcaccgagcattggctctgcgatagctacagactcgaatttatctttatagccattgatcgcttctgtcatctcatcgtactcagcaccatgcatcagatgggtaggctgtacaaccagattcttaacaccattctctactgcacggtcaagagcctgctgcatgttatcgatcacttcatcatctcttgcctctacatggttgatgatgatctgtgctgtaaatgctcttcttacagaccagtccggataagcttctgcaagagcatcctcgattcccttgacatcctctgcacggctgtcattgaaggaagtaccaaagcttacaacaagaagttcattctcaccgatctcatcctggttacgcggatcgtccttggaagcatctcctgtgtcacgtccgaaataatccggatctgcattctcaccctctaccagttctttctgagcatctgtcagagcatcccatgcttctttggctgccttgcagtcctcatctgttgtgtcgtttctttcctgtacatagatcttgtcgatcagagctgctacattatctgctgcttcctgatctgcatcagaagcctctgtggtatcagctgcctcagcgttctcttctgtagcagaatcctctgctgccattgctgttgtagccgcacccatagagcatgtcatggaaactgcgagcatcagagctaacattgtttttcttttcatttctcattgtcctcttttcatgtatttccagaatactgatatgtacaaaaaagcagcagctctctgcggccgcctgctcacacatgattctctgcgcaatacaaatacataaaaagaagttctgtattgttatggagaataccgattcgtaaaccgcgaatccctgaatctcacaataaggcagttctcctgacttggttccacgctgctttcccttcccggtctcccagtggttataaaagcaactcccctttcacagtgacggtatcgttccggattctcaccggattctcttttgcacatccgactggatgcaaccttatcattataacatttgcacatattttcttttacctggttatctaacttttaccacaaactcataaatttgtcaagattgatgtcagacgattcacggttttctgtgatcttcgctcaccaaaaacacctcgcgaaatattaccagtgaacagtaaccggttttctccctgtatctgtcagttattatcagaatactttctccaatattcatgcacatcctgcataaaaaacagcccctttctgtcatcaccctgatatcagaaaaggactgtcttacactggatattcgcaatccgcttcgctacttgctcataacagataaactgctttgcagtttatctgttaaaatactcctgctccaggtatctggctacgtagactccgctggcagatgcatgggacagagaatgggtcacgccgctgcagtctccgataacaaagagacccttgtggcaggtttccagattttcgtcgatctcaacctccatgttgtagaatttaacctccacgccataaagcaaagtatcgtcatccgcggttcccggtgcgatcttatccagagcatagatcatctcgatgatgccatccaggatacgtttcggcataacaagacttaaatctcccggtgtcgcagaaagtgtaggtgttacgaaactttcctcaatacgggcttttgtgcttcgtcttccgcggatcagatctccaaaccgctgtaccataacaccaccgccaagcatattggaaagtcttgcaatgctctcaccgtatccgttgctgtcatggaacggctctgagaaatgcttggataccagaagggcaaagtttgtattgttggtatgctttgccggatcttcgtagctgtgaccgtttactgtgatgataccgttggtattttcattcacgacaacacctcgcgggttcatgcagaaggtacggaccatatcctcaaacttctcagttctgtaaacaatcttgctctcataaagctcatctgtcagacggctgaaaacctctgccggaagctccacacggactccgatgtccacacggttggaaagagtcgggatcttaagctctgtacataccgtctccatccatttacttccgcttcgtcctgcggagatgatacagtaagttccctcgtaacgctcatctcctacaaaaactgcataaccgtcttcagttttttctactttgtcaacagatgcgtcaaaatagaagtccacatggtctttcattttttcatagaggttctgaagtaccacatagttgatatctgttcccagatggcggactgatgcatccagaagatgcaggccgttctgaaggcagagcttacggatctcgctgtttgtggtagaataaagtttggttccctcaccgccatgcatcaggttcagtttatctacatattccatcagctctgtagctgtatccttgccgatatgctggtacagagttccgccaaactgattggtgatattgtattttccgtcggagaaagcgcctgcaccgccaaatcccttcatgatcgcacaggttttgcagtgaatacaggattttactttctttccgtcgatgggacattttcttttttccagaggatgaccggcttcaaaaaccgcgatctttttctccggatcattattcatcagttcataggccgcaaagattccaccgggacctgctcctacgatcagtacatcatatttcataaataaaaactccttatcttgtattgcacattttcagtgctttgtttttgcacaaaccctgtctattctacaacaagtgtgttcaaaagtcacctgttttttcggaaccttccgatcttaagcttctttccatctgtttccacggtaatagcaccgtttttcatggtgtattccacctgacttccggccgctttaagccgctctacggtttccggtgacggatgtccgtaggtgttggtggaagaacaggaaatgatcgccacttccggctttattttctcaagaaatgcttctgtggtagaataacgggaaccgtgatgtcccaccttcagacaatcaacatcctcaagccccccggctgccagaagctttttctccgtatctgcaccgatatctccggtaaaaagcatctgaaaatctccaaaagacagctccatcaccatagcttcctcattcacatcttttcctgtggcatttttctccggccacagaacagaaaaagatactttgccgcaaggcaattcatccccttttcctgctgtcacgaccttaactccggctgtttttgctgcctctgcaagctccctccatgcatctggtctttctgcccaggcaggcaggatcagatatccggcccggatggttgtaagaccttttcccatatattccagaagctccttcacaccgttgatatgatcctgatctgtatgggaaataaaaatcccatccagccaggaaatcccctgacttttcaatgccggcaaaaggcagtatcttccaagatccgactggctgctgcttcctccgtcaatcagaaaatgatgatcctccggggtctccacaagaataccgtccccctgtcctacatctaggcagatcaccttcagacttcctgctggatgatatcccagtatcaggattccgactgccagaaaaataccggctgttatccggatagcatatagcttccaacaacctgcttccgcccgctcctctgctagctccgtttcctcaccgactgcttttttcttccggagctgttcttttatatactgccccataaacagaactgtgatcaaaaagccataatataacaggatctgccatatttccggctctcctccgatccaggtactccatcctgaccttcctgccagactgcagagatgttcataaaaaagtagcagtacccttgccggcaggagcaccagttttgccacgggaatactgagaattcccagaagcagcgccgccattcctccagtcagcactacccccacacttggaagcaccaacagattcaggataaatccggcaatagagacttctccgaaaaacttcagcatcaccggcagagtcacaagctgaagagctataggacttaccagtgcctttgtccattttttttccgctcctgcaagggcacagatcttttccgcagcgagccccattcccagaacacagccaaaggacagaagaaatccgctgtccatgagataggccggagattccacaaggatcatcatggcagttacggaaagagcactcatcatatcatagatccgtccggtgatcctggctcccatggcgatcaaaaacatagttactgcacgcatggtggaaacactccctccggtcatgatcccatactgtagcatcactcccagagaaaaaatcccggcaggccagatccccagtcccatcttctttagaaggttgtaaagccccattcccagaatactgatatgaagtccgctgatggcaaggatatgtatgattccggccagctgatagcgcatctgtgtttccggatccagttcctgtttgtctccaagcgtcatggcacaaaaaacaggcgcatcttttcctgcagcttccttcaggatctgtctgcagctttcttttatctccaaaaggagctgcctgtagccggaatacactgctgttttcttttggagcacagcgttcttcataaaataataaatatgacgacaggcataaaagtgctggctgtcaaagccccccggattcgcaggaccttccactcttttcagcgttcccttgaccaggatccgcattcccggtttcagatcttcttcttttttgaaaaatattcttacattttcaattggaaatttttttgactgatggataagatatgtttttttcagataaacagactgggaaaattctgtgttttcatactgttccacctccccgcagatcatggaaccagggtgcgcttcgatctgctcctgcacatttaacggaaggggattccccctgatcagaggaatccccataagctccagtgcgccaagactcagcaccataagaaaacacaaaagacacatcggccttttcaccataaatgttctcccgttttctaatattttgaaatgttttattttttctgttcttttttagcctttgtgtgtgccagcaggctgtcgttccattcatagaacttataaagctgcatattctggccaaaagtcacttccttgtttccttcgatggaaatctcaactttgtccacatccgttgccgcgatcagcgtatttaccaccgaatacacggcaatctgttccgaaacatccagcgcataatcctgaaatacggaattataatccacatagcagattccgtttgctctcgtcagagaaagtacctctgaattctccggtattgtaggataatgtcctttttccaacggacctcttgcaagctgctccagaaccaccgtagccttcggaagatttcgtctgtagcggacacttctctgttccgctaccagtttatctccgtttttatttgtgaaatacaaagtaaaggtgtcatagctgtacacatccccatcggacccggaaaactccacaaaggtgtcgttgttcatggctcccacttcttcacccctggtatctgtcagcggctttttacccacatagatctccacagaatccactcctggaacctgtaaaaagatcttcactatacctgcccgcaccagaagttctctggtacgtgacattttatcataggcctcattgaattctacgttcaggactccatcctgtatggaataagaagaaatctttaccccatccggaaaaagtgagattctgtcttcccgggtctcacggttattcagactctcggaaaaatcgcgcagcatcacttctgttgtttccttctccggagtatatttttcttctttcagtctcgtttcatcgctgttgatataataaaatctatactgctgttcttcgtttttatttcttcccgacaaacctatgaaagcaaccagaccaaaaaggatgcaggcagcggccacacagatgatcaaaatcgtttttttcatgctgtacctcctaggacgggatataggacagcgggatcttcacggtaaatgtggttccctcgccttctttgctagataccttgatgatcccatgatgcatagctatagaacttcttgtaatagcaagtccaagaccggttccaccgatctctctggaatgggatttatccacacgataaaaacgctcaaagatccgttcaatggaatcttccggtattcccaggccggaatctgcaaccgtcacatagaaatccttatgatccgcatccagtgttacgcggacccatccctcatctacattgtatttgataccattttcgaccaggttactgatggcaagggtaaatttcacctcatccacatctgcggttaccggtcggaacgaatccaggatcaggtcaatccttctctgatctgcaataggacggagacgcttcaggatattctccagcaactcattgatattcatattgctgatattcatatctgctgcttttttgtccatttttactagggagagcagatcggtgatgatcttgttctctctgtcaatctcttctgtgatatcagaaagaaattcctgatacagttcctccggaaccccctgctgtcctaccagcgaatccgccagaaccttcattgaagtcataggtgtcttcagctcatgagacacattggatacaaactcctgtctggattcatccaacgtcttcattctggaaagcatcttgttaaatgcatctgtgatcaaagctgtctctgtataatccggtaccgagatctccccattctgatatccgtctgtaaggtcctcgattgctttcgttaccctggcaaatggcttcaccaggatcgtggaaagaatataccccagaaaaatggccagcactacaatgataccgatgatcagaatccctttctgctccagttcatggatggttgctgtcacctcactggaagatgccatgatcatcatggcaccctgcacctgttttacatccggactttttaccggaactgccaggatcagcttctggctgtcagaatcatattggtaggcatcttctcctttaaaacagttcaatactttctgggaaaccagagtcctgccctcatccacgccataggtatccttgatgatcctgaaatccctgtctacaatgagaatcctgccaccatagctgttggacagtaattccagcttgctgttcaccgtctgagagctggtgtcattcagataattctccttgatcagcaggtcgcacatgatgtcacagatgttctccatgctctgcacacggttggcaatggcacgatcttcatagttggcaatgaccatttccgttacgatgacactcggtacgattcccagtatgatcaggatgatcagaatacgaaagcggagacttttgaaaaatttgccgttctttttgaacttcacaggttatgcctggaaatagtagcccacaccccatttggtgtgtacatatttcggctcactgggattggcctcgatcttttctctcaggcggcggatatgtacatctacagtacggacatctcccggatattcatagccccatacgatattcagaagattttctctgctgtataccttgttcggattgaataccagcagctccagcacatcaaattccttggctgtgaggttgatctcttttccggagataaatacgcggcgtccttcgcagtccagcttcagttctccgacttccacagtcttggccttctcctgcttgtcctgtttgctgcctgcacggcggatgatcgccttgatacgggctttgacttccaggatgttgaaaggcttggtgacataatcatcagctccgtattccagccccaggatcttatccatatcttctccttttgctgtaagcatgatgatcggaatattggaaaattcacggatctgctggcatacctcaagaccgtccatttttggaagcatcaggtcaagaaggatgatatcgtactctcctgcttttgctttttccagtgcttcctctccgtcataggcacagtccacttccattccatcctgctccagactgaagcgaagtcccttgacaatcagtttctcatcatctactaccaatactttcctgctcatttagcgctccttactttattgctattttatcctttatcttctcataggttccttctttgatgcctggtacattcatgatatcctctgctgaagtaaagggaccgttctcttccctgtaagcgatgatcgccagggccttggactcccctacacctgtgagagtagtaagctgggatacatcagcggtgttcagatcgatcttctgctctgtggaagatgcagtctcggcttcaccggaatcctctccggcggatttctgtccgctcgccgtttcggtactgttttctgctgtgacttccgatccatcctgggtagctgcgatccgctggctgtccacctccgcctgggtaggcacataaacctgctgtccatcggaaagtcccttagcacggttgagatagcttgccgcagcttccggaagatatcctccggcctgctcgatagcctgaaaaacacggctgccatatggaagctcatagactcccgggctggtcactgctccacatatatctacataaatggtctgaggggtgtctgaaatctccggcagctgtttttcaacctccggagccggttcctccgcagactcattctgtttcttctgtgatatatctgccgcagccactgcggattccttcccggatacttcactttccgtatccttcggttcttcctgctctgcatccattccggatgcttccgtactttcttcctgcaccagttctttctccagaaattctgttccgtcatccttacagcctgtcagccctgccaggatctgtaacaaaaatatggaaaaaacaagccgaacacttctgatatgtgatcttattttcataggtaggcggttcactcctttccaccgatgtggcggcaggtgccccgttactcatgcaaaaccataccttattttaacgaagtattacaaatattacaatacttttatttctatttccatttgaaaataaccacacctgcaatacagatcagcattcccaacagctttctccactgaaaatctgctctttccacaccgaaaatccccagcaattctataagataagccaccgcaagctgagaaatgacaataagcataaccgcccgcgcaggccccagacttcccatactccggatcactgtgatagtgataaatgcaccgatcactcctccgagtaaattatatttatcctctacctgccacagcatgccgatactttctctgcctgtaaaaaaccatgctgccacacagaccagaaatgccgaaaactgtacccagccggttgaaacccacagactggtctgttttgttacatttgtgttaaataccccttgaatactcatcagtgcacctgagatcagtgctgacaaaaatccccacataaaaatccctccatatatactccatttccggtattactgccagaaaaaggcgctgcatatttctgcaacgcctttacggtttcttataatttagtttatgtgattttcctgcaattatacacactgctgccctgttttctcatccgcataatatttatatacatgatcacgaaacgctctttattccggaaaatattttctgagatatatccttccggaaaacgcaatatgcggcatctcataaaaaatggctgttttcggacagatcggacgatagagtgggtctgccacaatgatcctggctgttttcagcttttcttccatggcttcctcgccacagatggcttcatctcccttgcgcaaaagcccctctgtgatctccagcggacagagcagctgaaccttttttccgtatttctgctctatgactgctgccagggagcccatggtaacaggttctccgatgatggtaatgtccggtgcggaaaaaaacacctcatttttgtcgggcattttcctgctttctcctgaaagatcagatactgctgacagactgttccttccctgaaaatagattacctgctccggagttactttccacagttcctcctgtttccctaagatctgccctccgctttcctctgcggagtcatccttcttatttacccactctccacaggatctatccgcgatccgctcaagtgcatctgaaatctgtccctcatagccttccacaggattccccacgagaaatggcgtaccgaatttttctttcagcacattggccgccgggattcccacagaggataccacaaggtttaccactgcttcaccggcacgggacaaagcttccagcgtatcccccatagcccaggtggaaagtatctcccagccatagtttttcagacgttttttcattgcatctactgcagactgcgggccaagatcgaggggtgttgctccaagaagatttaatttcctgcttctcttctctgtagatctttccgcagatcccgtcggtacttctaaacaccttcctgttttctctgctgctcctgtgaaatgtcctgcgatttccgccagtgccagccctgctccgtatacatagtcgtgcatgccgctggtcggaaccgaaaataccggaatttcggtccttgctgtaagtgcacgggccagtccctgaaaatctgttccgttcataaaagggatcggtgaacttgcaagtgcaataaatttcggtttcagctcctttgccgcctcttcgatatcttgaagaaatttctcatcatttcccataatggcatcgatatccgtaagacctgagataaagatcagactgtcctggtcgtaccaccggatctcatcatgggtattataggtagaattacagccggagggatcatgcatcactgtcattcctccaagctcatacaacgcggagcagacaccagacacgtctgccgtgtagatcggtatgatccgatatgcctgtctcatatgcagctttcgcacccccatccctttcgaacgatcagatcctccggagctttttcctcattaaatgcctccagcatcagctgtgcagtacgtctgataccgtcaaagccccaaagcccgccaccctgtaccatattgacaaaattccggcttccggtaaaccaggctgctttttgtccaacggcaaggatttttccggaatgctgccgtggccgcactctcatctccgggcggacagtcgaaatcaacctgagttccgggtaattctccttcagccagaaaaatacttctttttcttccgggctgatactgtccagaaaaacggactgtacctgaaatccatgggtaaggagaagctttgcaagtcccagaggtcttggatgaaaaagataatccacagctatgggagtgtcaccgatgatctggtgtgcatggaaaagagcttcctcgcattttcggatctccgttttgatatccaggccatttttaccgcagctgtgctgatcaagcagctccagcaaatgcttttcctgcgtctctatctcctcatagtcaaagcttccgggcaggtataaaaacggccttccaagtctctccgcctgctgctgtactccgaattttcctgccggataacagttaaggatcaggcttccctctcccaagctctgataatcctcccaggtcttacaggccggtacttcccggagacggattccgttctttttcaggatccggcagatatctgcactctcatccagaacaaaatcactgcccaggactgtgacacattccggatcagctttcctctccggtactgcatcatacatggcacggcgcagcttctgatccggagtcgggcctgttttctgcatgataggatccataaagcaccgcataaaaaagatctccggaaatctttcttccagttctccgtagatgcggtccagatcacttcccagaaaatgatgaagacacacggtaaaaagcaatactgcctttggcttctcatccagccggttcagaatgtccgtcacgccttcaatggtcacatcctccagatttccgcccagaagatccttttcctccacgatcacaaaggaaaaacggtctgccgcattcatctctgcggcagtcagcacaacgccacgcatgcagttatccgcacagacgtagatctgccttgcttccggaaccagcattcccgtatgtacgatattccagtttccatggaccggtgaattaaattccagccccggctgaaagggaaccggaaaagaggcttcctttataaatatttctgtttttcccgaaagctctctgttaccaactctttttaacatgagccttcctccctgcatgcattcaggatctgctcggccagtgtccggtactcctctgccatctcacaatccggataagcttccagaagagtttttcctcgattctctgcttccaggaccagagcacttctggaaagcgttcccactacccgcgtatgaaaatcctctgccagctcccggactttttcttcctctcccggcacgttccgccggttcaggatcacgccgccaagagatgcatatcctctgtttctgaaattatccactgccatggcaatatttgcccctgcatggatggccatgttttctccggaggtgatgataaataccttatctgcatacccctttcgcatgggcatggaaaatccaccgcagacaacatctcccagtacgtcataaaaaacaatgtccggtttataggtctcataggctccgttttccttaagcttctcgagagcagtaatgatacctcttcccgcacatccgagccccggtgcaggaccgccggcttccacacagactacacccccatatccgatctgcaccatatccgtaagcttcagctcctggcgtttttcgttatacagctccagcacagtgggaaccttttttccatgcctgagaaggatcgtggaatctgccttgggatcacagccgatctgcatcactttcattcccttttctgcaagggctgctgccacattggaaaccgtagtagattttccgatgccgccctttccatataccgcaacttttatcattttctgtcctccgcttttgtgatcacattggaatatgccgttttggcggaaactccactgaggtggccgatctttccggataaggagctgatcacatcctgtggtgcgtcaatggcaatactgatgatattgatgcctttttcccggtaagggatacccattctcccgataatatattttcccgcttcatgaagaaaacggttgatatcatcgatcacgtcattgttttccacaatgatcgagatcaatgccactcttgtctccataagatctgactctcctttccgatattatcagcagatcctcggcagaagctctcctcccggctgcggaagaagtgcctgcgttccgatctccgtagtcatgacaacctttcctggctggtcttccgtaacttcaccgataatggctgcgtccctggaataaggacatttacgcagtgcttccacgatccttcctgcctcttcctttggtgccatgatcaccatgcgtccctcacatgccagataaagaggttccaggccaagcatgccgcagacaccctttacctccggagctaccggaacagctgctgcatccaggcggatccctacgttactctgtcctgcgatctcgtaaagaaccgttccgacaccacctcttgtggcatcacggatcacatgaatgttatgggtggcatccagtacatcttttacagctccccacagcggtgcgcagtcacttgtcacatctgcgtcaatgccgaaatcctctcttgccagaagaatggtgcatccatgtcttcccacatcaccggttacaataatggcatctcccggttttgccagctcgccgcctacctgaacgccctcctggatctcacccattccggttgttgtgataaacacaccgtcaacctgaccttttcctgccaccttagtatctccggaaacaatacgcactccggcttcttttgctgttttttccatggctgcggcgatctcctccagcttctccattggaaaaccctcctcaatgacaaaagcgcaggtaagatacatcggttttgctcccatacaggcaaggtcattaacggttccgcagatggaaagcttgccgatatttccccccggaaaaaatgccggagaaacaataaatccatcggtggatactgccatttttcctgcaggcggaaccagcacggccgcatcatcggctgtgagatccgggtttgcaaaatgcgctttgaatacttcatcgatcagttctgaggtctgacggcctccggcaccgtgtgccatggtcactgttttattttccataatattatcttctttctatgctgggtcaaaggaatttcatatcggtttcatcctgtcagatcttccggatacgatccttcgtttgtactatatgtaatgtatcatattttgcagtccattaaagcggacatcagtttccgtacataaaatatgcggaacatgctccttcattggataccatacaggcacctaccggatgctgcggggtacagacctttccgaataccttacaatctgatggcctgcattttccctgaagcacatccccacagcgacaggccggatttggcctgccctggatcggcggcactgcatatttttttctggcatcaaaggcttcccactccttccggagcaccagcccggaccccgggatcacacccagaccgcgccattcagaatcgcagggctccatcagttcatcgatcagcttctgtgcctccgggcttccctcactttttaccacacggggatagcagttcacaaagaacggttttccttcctgaaaacgtaccagtgcaacagccagtgccgtaagcagctccttcgctgtaaagcctgccaccacaccactgataccttcctctgccagctgctcacagagcgcagttcctgtgatcgcattgacatgtcccggataaaggaacacatccgcactgccctttaatgcctgataagcctggggcatggtcttgtttgccacaaggagcgaataattggaaagtccgtcctctccggcctttttcacggaaagacagccggcaggcgtggtggtctcaaagccaacggaaagaaataccacctgctcttttggatgctctttcgcatatttttctgcatctgccggtgaatagacgatccgtatcctggctccttctgccctggcatctgcaaggcttttctttgttcccggtacgcggacaagatcaccgaatgtgcagatcgtcacctgtttttccagagcaagataaacggcctcgtcaataaaccctaccggtgttacacagaccggacatcccggtcctgagatcagctccacctgcggcggcagaagcttgcggatccccagacggaagatctcgtgggtatgtgttccgcagacctccatgatccgcaccggcggcccctgatatccttctatgatttctcttgctgtttttttcctctcttccatcacagcagttcctccatcagctggtctgtctcttcctcgtcatcatcggtgatctttgcaatggcaacacctgcatgcaccatcacataatcccccggctccaggtctcccaggagctgggcagaaacctctctctttgcgccgcctgcatccaccactgctgttccgtcactgatctttactacttttgctgataatcctacacacatatctgtgcctcccatcctgcatttctgctgtatgctccatgcattatcataaaacatttttgatccgtatctgcatgatctcatctatatttatctgtatcgctgcacataagccatcccatacaccgcctgtcccagtgcgatccctccgtcattcggtgggatcaggctgtgcttcagaactttaaaccccatttccgtaaggccgtcatctaccagctccagaagcagccggttctgaaagacaccgccacttaatgccactttccggattccggtctgccgctctgcttcctcacaggctgcaaggatctcatctgccagtgcccggtgaaatccataagccagcttcccgggatcctctcctgcaagccttgcccggaccagatatgcaacgatctcacctgtatttaaaataaattttcgttcatcttcagacgcttctgagatgcctgtactttccggaatgtcttccttttctgacatccgtatcttcagattttcttccggatttttcttctgcatctcccgctgctttctccaggcctccgccgcaaattccagtgctgtggacgcttctccctcaaaggtggacgctctccggatccccaggatcgcactgactccgtcaaaaagtcttcctgcactggtggaagtcacggcattgatcttccgctgtgccatagtcaccagtacctttgcttcctgatctgtgcaaagtcccagtttacggacagtatccagggttttttccagatttcccatattctgccagatcagggaaacggcgatccgccagccttcttttgcggaaatatctccgccaacctggacaaagggttctatacttccaagccttgtaaatccttgacagtctgcaaccaggagctctccaccccagatggttccatcggttccatagcctgttccgtcaaaggaaacccctatcaccttttcttcgcagtcattttctgccatgcaggataaaatgtgtgcataatgatgctgcaccctcagaaccggaagccctagctcctctgccaccactgtggaattatatttagggtgaagatcacagaccactacctccggctgcacctccagaagtgtttccaaccgcccgatcgtttccttcagggcttttaccgttcgaagatcctcaagatctcccacataaggggaaggataaaaacggttatccacaccaatgcagaaggtgttcttaagttctccacctgctgcgatcacctggcccttccagggtgtggagaccataaacggaagaggcgcatacccgcgggaacggcggatcatatagggttcacccttatagaaatccatcaccgaatcgtcggcccggatacgtatcttcctgttgtgggaaagaatgcagtcacagagatgggaaagctcctctgccgcctcctcatcatctctgcagatcggcgccccggaagtatttccgctggtcattaccagaagcccgggcatccggatcccatcatcgtaatgaaaaagaagcagctgaaccggtgcatagggaagcatgacacccaccttgggattcccgggtgcaatgctctcacaaagcctcgtttctcccggcagcttatccaacagcaggatcggcttttgatgaccggtaaggatcttctcctgttccccgctgaccttacaaatcttcttcacagcttccatatcctgtgccatcactgcaaaaggcttcaccggacgccgtttccgctgccgcagccgctgtacagcctcctcactggtagcatcacagcaaaggtgaaaaccaccgatccctttgatggccacgattccgccggaagcaatgatcttccttgtataagtgatagcctcccgtccccgttcctttcttcccgccaggtatacctcagggccacagtcattacagcacaccggctgggcatcatagcgtctggtatccgggttatggtactcatccgcacaggagggacacatgggaaattccttcatactggtccgttcacggtcataaggaagcgaatccaggatcgtcagtctcggaccgcagcaggtacagttgataaagggatgcagataccgcctgttttccggatcaaacatctccgccttacattcatcgcagatcgcgatatccggggaaacaaagatttccccctttgtcttctcactttcgatgatatcaaactgtgtaaatttctccggatcctccaccggttcttcaagaagcttcaggatagcggcacgcttcggtggcttattcccgatatctgcgataaaggcatccacatcctgctgcttaccctgagcaaaaatctccacatagggtcctttattggacacactgccacggattcctcttgccatagcatgacggctcaccgtagggcgaaatcccactccctgtacgatcccgtaaacacggatcattttcgtaatttcccgctccatatgtttctccattccctgcagctatttccactgatccggctgcagcatgcatgtaactttatgtcctgcccttatggtctacctgcattttccggataccgcaaaatgcactgtatccacaaacactcctgaaaaagcctttgtcatccgcttcatacatgggtctgcaaagatcacgtcatatccgcccttctctgccagttccatgtaatcttcctcatcccttaatgacacatcgccctcctccaggagatctttttccatggaaaaccagcttgccacggtgagctctccgtccgcaccacgtttccgtagctcctctcttatggaaccggccatcacctgctgctgcacgatgagaatcttttttcctgtataatccatatcaggaaccagctcttccgccagaggatatcccacctcataaggtgttccgaaggttttctccagatatctggcacattccagtgccgcaggagaaaccacgatatttttttccacagaggaggctttttttacctcatcaagcccgtctcccattccgtagcagactgctctctgtcctctggcacggaatttttcacggatcttgtctgctgctttcaggtcactgacatcctgaggtgtcattccgagaactcctgtcttaccagcctccacaggcagcttttcccgggcaaaggctttaaaaagctccagataagccttccgctctcccgcatcataaagctccattccgttggtatttactgcaagcaccggaagatctgttttcttctcgcacatccgccgcagtgcctgatgatccgttccgatcacagcaggtaccggtgttccgataatggctgcaaagcctgcctccacctttactgctgcatccacaagcttggcaaccaggcggtcatcccgtcccaggatggcatccatatcccgaagtcctgcactgaataccgcgcttttctgttcaaaccatcttggttcatcaaagccgcagacatttcccgcacatcctcctgcatcacagatcacgatgataccgccaagctcatacagcactgacacagctccggactgatccggtgcaaaaggtgtcagatatttccgaagtcctctcataccttttctcccttctgcaaaactttctctgtcagtgtctcaaacagcctgcgtacccctgcatagccatagggctgccggtcctgattccacacggcatttggctgatcccggtgataatatcctgcatcctttcctatagtaaggttcactccgctcccggacggatcgtaatacagcatggtgggttccatattggaaaaaacctttgtatccggactcaattccgcaagatgccgtatgtatacaaaattctcggctgtgatagttccgtagatctccggcacccggaaaccataccgcaccagggccagggccaactcaaaggaatctccgttcatgcactcccctactgcaaaggacgcatccggacagacctcccggaatcgctccactgcctcttctgctgcttttttatacacttcctgatcaaaagagactccaagaacctgtcccaaggcacgatactgattttcgatcttatctgtctggtagagcctccgaagctcaataaaaggaatcttcagccgggcatgaaaatcctccgctgcaaaccttgcttccggatgaagcaccagattaaaattggcctgtgacatggtctgatattcttcataatccttacatcttgagatttcatggatggtctttacgcctgcctgctgcagcagctcatacatctcgcagtcatcaaccagcggcgaaaaaaagcccagaagattgaccacatttccctttttcttctgtggctcaaggagggagtataaggactggcgcacatggaccataggcggctttctgccctcacgtgtcagtgcgtacatgtaacaggggcgcaccggaatatccaccttttcctctgccttccggcagacacgttccatatccgttcccagaagtgcatccacacaggtgatacagatcatcaccacagacggcttcttctcacagcagtcgcagatctcttttaccgctttcgggatctttttcaggtgacggcctgtaacaatatccgtctcgtccatcatcagataaaaaaatcgatcattgtactccggcatggagctgataagagaagtatttcttccgcagcatcccggtgccacgatcagcataatggaatccggcactgcaagcccggcccgctttacgccaaagccctccgctcccggagagttaaatgccagagttgccggagagctgtagatcagatgcttcccggagatcatctgcggagggatcgcttccagcccgccccgggccagttcttctgcagttgcaaaatatgcttcctttttcatatatcctccttctccgcttcttcactttccaatagcttcctcgccagtgcaaaaaatttctcactgatctcagaattctcatctccctcgatcaccgttttgccctgatcctcccatcggatgatctcgtcacttctcgggatctcacccacgaccgggatattatttttttttgcaaaagcatttactttttccgtttcattctccacattcctgtgattcagcacgattccgaagattctcgcatagcttcgatcctcaaaattccgcacagcactggaaatattattggctgcatagagtgccattttctctccggatgtgacaatgagtactttttccgcatagccctcccggatcggtgccgcaaaaccgccgcatactacatctccaagaacatcgtaaagcactacatccggcttccaggtctcaaaaagcttcagatcctccagaagctgaaaggttgcgatgatacctctgcctgcacagccaagtcccggcgtggggccgccggtctcaatgcagaggactccaccaaagccctcctttgaaatatcctccagcttttccggctcctcatcctcttcccgcatataattcattaccggccgcagaggttctcccccaagaagattgatggtggaatccgccttgggatcacaaccgatctggatcactctcttccccatggctgcaaaagccgccgccaggttggacgtcactgtagactttccgataccgccctttccgtatactgctaccttcagcataaaatcctccctaattcattctgtccgctcccgcagatatttttcataaaaaaagctctttcacgtacaaggtgaaagagtcccgtattccgctcacaaaacaaagtcaagcggatattcgcgatccgcatttgctgcttgttcataaccgaataactgcttcgcagctgattcggttaagctgtgccggatgaacaacgattcctgctcggatattccttgccgtcaaagtctgtttcctgctgtattttgttttaatgcctcatccggatagaaagaaaatatttcgttccgtctgaatttttctatttttattatacaatggtgtacattagtgagtcaattgcaactctgactttttatacaaaaaaagaccccaaggcgaaatatttttaagcatttcgccgagaagtctcttctctgatctgccggctcagaagccgcggcaaagttattcttatgataaagctttactggatagaaactacgtgatatcctctgtcttccactaccttcttaagctcttcgttggaaatctctctgtcgtaggaaaccactgcctcaccttttttcaggcttacttttgctgccgcaccgtcaatgcggttgatcgctcttgtgacgctggccacacagttctcacagtgcatgcctgtgatcttcatggttttctcacccagcttggttccatccagcttcttcttcgggatctccggcttgctgccgcctccgcagcaggcgccttcgcccttcagatgtttatatgcgccttttccggcaaacagcataatgatgataacaacgatgacaacaattgcatttgccatgatttctttccctcctggttacttatgcattccactacagccggagcagccggaacaatgaccggagcagctgccgccacagccacctgtatgtgtgttaccggcacagccgacacagctgagcccctgtttctttcttgaatagagataactgatcacaaatacgccatatgcgatcaccagtgccagtacaataatatccgctatcatactcatatctgtcaccctttctttcgctgtacagcctgtgaactgctgccagcctctgatgaatacttttgtaaaaaaacttccatatttcttcagacttattatagcacagaagaccaggtatttacatccccggtctcctgcatttcttatcatttcagctgttcttacagcatcatttcaaagctatcatatgtaccggatcgttactgtatgaccggttttcaattactctgctgcctgtacagatctctttgtaacatcgttctggttcttgtacggatctggtctgaacagaaggaagagcaggatcgctgcaaggatcagcgctacgatcgttccaattccgaaggaaccggcacctgtgacaacaagaccgatctggtatacacaaagtgttacaacataagcaaaaatgttctggaagagaattgcaaaccagaaccattttctggactgcatctcatgtgccattgtagaaatagctgcaaggcacggagagtcaagcaggttgaacagcaggaaagaaaatgctgctactgctgtcgggaaccatgctttgatcgctgcaccaacgatcatggtatcctctgcatcatcaccagctacgtttgcaagaacacccattgtacttacgatggactcttttgcggagaatccagagatggaggctgcaaccggctgccatttgccaaatccaagaggagcaaagatcggagcaaggataccgccaaggatagccatgatactgtcgttgctgtcctcaacaaatccgattccgcttcctgtatttccgatgctggaaaggatccacatgataacggttgcaaggaaaagaatggtaccggctttgatgatgaagcctttcagtctctcccaaacatgaagcagaactgtctttacagacggaatgtgatactgtggaagctccattacgaacggagcaggtttaccggagaaaggttttgttttcttcaggatgatcgcagatacaagaactgctacaacaccgataaagtacatcagtggtgtaatgaaaccagcagctacatagtcaccggttgcataagcggtcatgataccacccataagagcgataacaggaagcttggcaccacatgggataaatgtcgctgtcatgatcgtcagacgacggtcattatctgcctcgatcgttttggaagccatgattccagggattccacagccggaggagataagaagcgggataaagctctttccggaaagtccgaaatgacggaatacacggtccatgacgaatgcgatacgaaccatgtaaccgcagtcctcaaggatggaaaggaacaggaacaggatcgccatctgcggaacaaatccaagcactgccccaagaccaccgatgataccatctgatacaaggctcaccagccagtcagcaacaccggcattgccgagtccatccgacacaacactctggatggttcccacaaagctgtcgtttgtccagtctgttaccatggtaccaactgttgttaccgatacataataaacgatgaacatggtaaggataaagatcggaagaccgagaacacggtttgttacgatacggtcgatcttatcggaaactgtcatcttatttccgcttctcttaacgtttgcagaaacaaccttctggatgtactgatatcttccatccgttacgatactctctgtatcatcatcctctgccttctcaaggccagaagcaatctcctcgatcctggactgtgcagaagccggaaggttcagaccttcttttaccttgctgtctctctcaagaagctttactgcataccatctcttgttctcctcagcgatgtttgcaggaacaaatccctcgatctcatttacagctttttctactgctttcggaaattccatctgcttcgatggtactctgtgctggttcgcacatttgattgcctcatcaacaacctctttaaggcctgttcctttaagagcagaggtctcaacgatcgggcatccaagcgcggagcttaagccttttacattgatatggatgttgttctttttcagaagatccaccatattaagagcgataacaaccgggataccgatttcaagaagctgggttgcaagatacaggtttctctcgatgtttgttgcatccacaagatcgatgatcacatccggtttctctttcagaaggtaatcacggctgacaacctcctcaagtgtatacggggaaagtgaatagatacccggaaggtctgttaccgttacatccttctggtttttcagcttgccctcttttttctctacagtaacacctggccagttaccaacgtactggtttgcgcctgtaagagcattgaacattgtagtcttaccacagttcgggtttccggcaagagctattgttacagacattttgcatcctccttttttcaggtcagagcctgacgctctgtcatttttcgaagcttatttactttacttccacacatgctgcgtcatgcttacgcagggaaagctcataacctctgatggtgatctcaaccggatctccaagaggagctacctttcggatataaacctcgctgccttttgtgattcccatatccatgatacggcgcttgtaagccgggtcgccggtgatcttggaaacaactactgtagaacctactgctgcatcacgtaaagtcatttctcttttcctccctgttcatattccaattcctaatctatcctcaactgcgccttccgcagtttggggcaaatccactaccggtcactgcctcgcagtccggtcacaccataatgtgtctggccatttctttattgactgctactctggaatccttgacatttacgatcagattgccgtcaaactgagaaataactgtcacttccgcattctcaacaaaaccaaggcctgcaagaaatcttcttgtatcctccgctccggaaatacgcttgatcgtgccagtatcacctgactgtaaaaataaaatcggctgcatggaatccctccgtttctttctattaattaactcagtctaattagtcagtcctaactcataggttagtttatactaagttttttcgaatgtcaatcccctaaatgaaaaaagttaatcaagattaagtttttataaacaaaatataaaaaaagttcctgcattctgaggtatttctgtctggcagaaggttacctcagaatgcaggaactctgttctgattctttttctgtttgcagcctgttaagctaaaaaccccttccggaactttttctttcttccgtgctgctcatatttttatctcttagtggatctgatcattcaaaagcttcaggatcaaattctccgtttcattgattccgtagcttgcactgttgatacaaagatcataattatccggcttgccccactgagctccgccgtaaaaattgtaataccgtctgtgctggctgtccatcttcttcaggaaacggactgcctgcttcatattcatcttccgtacatccataacatgctgcacacggatagcaaaaggagctgtgataaacagactgatatgcggaatgtgattgttcttgaggatcgcatccgcacaccttcccataatgatgcagtcctcttttgaggccagatcgcagatcaggtcactcatgttaaagaataccgcatcctgtttcggaagaccatggtaacggttgaattcccggaaccagcccttgggatcaaatttatgcttcttctcatatttattgaaatccgcaaaatattccgcatcgttgaccgcgcccttttccgcctcaagacgccttaatacctgatcaaagatctccacatcataatagttgatccgaagcttgtctgccagtccgaaaccgatatcattgccggcacttccctgtgtacggctgatgcagatgaccagatggtcattctcagagattttttccctgtgcttgatcatatgattcagcgccacacgttccttatccatgatatccgtagcaacaaaagtctccggcagcgtcaggatctcctgaaagatctcatcatatttcttcatgagacggcttttttcttctttatccttgatggtcctggccatgttgctgatcagtgccatctcgcttcgaagaagatgtccgtccggtttggtatacatcagagcacttaagttccggatagtgccttctctgtcaccggtgaaggtacgtccaagggaagatcctacgctttcataaacctcgccatccagttcataaagcctggtggcaagctctctgcatttctctcgaatgttattatcctgcatattgatcctcctcccttataaaaagaataccagcatatcgatgatgaacaccggtaccaggaaacaaatggaccatgccatatatccgaagaaggacggcatgttgataccattttcgtcagaaagtgtcttgaccataaagttcggagcattgccgatatatgtattggcgcccataaatacagcaccgcaggaaatcgcagaaagcagctttacaggaaccgttcccagcgttgttgcgattccgtttgtaaatccaagagttcctgctgttgtcagaaataccagataggtcggcgtattatccaggaagctggacaaagctccggtcgcccagaacatctggtacggctcggtgataccaagattcggtcctactgctttcagaagcatcagggccggctgcatggtgataaaaataccgatgaaaagtactgcaacctccttgatcgcaccccaggtaaaatggttccgcacacggatcctcttatccgttgtcttaaaggacaaaaatgcagctgccaggatcaggacgatctcaatgatcgacgggaaacttaaagtaacctcaccgaaaatatgaatcccctttacatttccggctgcatcctggaatacaggcatacctggaagcattccgcttaagataacacccacaacgatcatcacaaggaagatgatattatgaagaccctcgatcttaaactcggtacccggtttgctgatatccggtttacgtccctctgcgatatccttcttgtaagagcgcatatccagatgatagaacacaaacagaagaatcgccatattaaggatcagtaccggaaaaagatgaaggctccagaaaaacggaactcctcgcatgaagcccatcagaagcggcggatcaccgatcggtgtcaggcagccacccatgttggataccataaagatgaaaaagatcatgatatgaccctttctttttctccaggaattcattttgatcaccggacggaccatcagcatgctggctccggtagttccgatgcagctggaaagcagggttcccagtgcaagaagtcctacatttactcttggtgagcccgcaaaatcaccctcaactgtaatgttaccggatacacagaacagtccgaataacaggatgataaatgtaagatagtcattgatcacgcactccagtactgtttccgcagtttttccggcaccgtaaacaactgcaaacggaatgatcataagaacgatccagaatgcaaccacaacgggctgatgtgactcccaccactcaccctttaccagcggcatcactgcaacacacagaagaaggcccgcaaaagggatacaaagccacaccggcacaccagatcctgtcccaccgtttccggctgcccatacacccacaggacatgccagaaatactgtcagaaaagtacacatgacggttaataattttttcaaaattctcacccctcacataaatttttttaccagtgaaattataacatatggcgttctaaaatcaactgtgtagatgtgcaatttatactcaaacgcgttctcttttttgtgcattttgctggtgtatcatagtagtttttgtttgttttcaaacacacgaccagattttcggatactgttttctatatctgttatataatttatatacattgtctctctgacaaaaaagcagccgtattctccatcggcacactaacctttccggaaaatactgctgcttttgtatctgttatttttttattattccatacactcgtcaaggatctctgccatcttgtcgatatcctcttttgtgatcacaagaggtggaacaaggcggagaacatcacttcctgctgagatcaccagaagaccctttgcaagagcttttttcaccacgtctcctaccggacgtcccttgatcacgataccctgcatgaagcctttgcctcttcttgtttctgcacagtcatgctttgcaaccagttcgtccagcttctcctcaaaatacggagtaagtccctgcacatgggaaaggatctgatctttttcaaaaatgtcaaataccttgctgacggctgcacatacgaagggatttccaccgtaagtggttccgtggtcgcctggcttcagggaggctgcagctgcttttttgttcagcacaaaagcacctaccggaactccacagccaagtgctttggcacaggtcatgatatccggctgtactccatatgcctgccatgcaaaataatgtccggtacgtcccataccgcactggatctcgtccaggatcagaatgatatccttctcatcacaaagcttacgtaagccttccaggaactcttttgtagccggataaatacctccttctccctgtacggtctcggtgatgatggcacaggtcttatctgtgatctgagcctttacactctcaagatcattgaaatctgcaaatttcaccccacccatcagaggctcaaagggttctctgtaatgtgcattgcctgtcacggaaagagcgccgatgctgcggccgtggaaggaatggttcatggcaatgatctcatggtctgcatggccatctctttcgtaggcatatttcttggcagccttcagagcaccctcaatggcctctgtaccactgtttgtgaagaaggccttttccatatggcttgcctgtacaagtttggcacccgcctcaatgatcggctcattgtagtacaggttggaaatatgcatcagcttgtcgatctgggatttcagtgcttcgtcatagcccggataatgatagcccagggcatttactgcgatacctgccgcaaaatccagatattcctttccttcggaatcatagaggtaacaaccatcgcctttttcaaaaactaccggaaaacggttatatgtatgaagaatactggcttcagattcttccatctgttcattcatgctcattgtaatatttctccccatcatcttttaaaattgcagtaccaatacctttgtttgtaaagatctcaagcagtaagctgtgcgggatccttccatccaggatatgaactctgtttacaccatgctcgatagcgtcgatacagtttttcagcttcgggatcataccgccgcccacagtaccatctgagatcagattctcagcctcatctacacgaagctcggagatcagagtggagggatcatctgcatccctgtaaacgccctcaatatcggacaggaaggcaagcttctctgcctcaactgcctctgcaatggcgcaggctgcatcgtccgcattgatattgtaggaatcaaaattttcgtcaaagccgatcgggaatacgatcggaaggaaatctctttccagaaggtcatgaaggatcttcggattaacctttgtaacctcacctacgtagccgatgtcttcgcctttggaaagcttctttttgcactggagaagaccgccgtccttaccgctgacacctacagcctgtacgccgagagattctaccagagtaacaagctccttgtttacttttgcaagaaccatctctgcgatctccatagtgtctttgtccgttacacggagaccgtttacaaaatgcggctccatgccgactttaccgacccagcggctgatttccttgccgccgccgtgaacaatgatcggtttgaaaccgactaatttcagaaggactgcgtccttgatgacgttacgctttaattcttcatcaagcatggcgcttccgccgtatttgatgactacgatcttgcggttgaaccgctggatgtatggcagggcttctatgagaacctctgctttgtcaagatatttctgatttaccatatgggtgtctcctttttttgaaaaatgatatggattgaaaaaggttttgttgttgtatgttggagggatttcttttttattataattttgtctcagctaacagctgtggatttgcgaggaggggaggcactcggagttccgaaggccgtttcccctcctcgcgctcctcccctccggccacggggaacgggctgttgcccgcgttgcgggcaaagcgcctgctgcggacaggctgtcgcagacagccgcctccaacgcgctttcgccgaaggcgaacagctcgtcagtctgccttcggcgactgaagttctacatgccacagccaagcgtgcccaacggagggggttcttagggggagcgtgcgggcttcgcaactttgagctcgctccccctaagggttttctcagcttacaaactgaaacaaaactacaactaaaatccaccataaaaaacattctacaaagctcttacatcaagaacgataatccgcattgatctttatgtaatcataggtgaggtcgcatccccacgcagttgcggatgcatctcccatcttcatatccgcgatggctgtcactgcctcttctgagaggatcttagttgcttcctcttcgctgtagcctgtagaaactccattttcaatgatcttgatctttcctgctttgctctcaaagtagagatctaccttttccggatcgaactggacgccggagtagccgagggcgcagaggattcttccccagtttgcgtcgtggccgtagatggctgcctttgttaaggaagaggttactacggatttacttaaggttacggcttctgccttggtagctgcgccgatgaccttgacctcgaagagtgcagttgcgccttctccgtcacctgcgatctttttggcaagggttgtgtttacgtaattaagagcttttttgaactcttcataatctgcgtttttctctgtgatcttcggattgccggcctggccatttgcaaggaggaggacagtgtcgtttgtggaggtatctccgtcaacggataccatgttgtaggtgtccttgatatcctcgctgagtgcttcctgaagaagttccttggagatatccacatcactggtgataaatccaagcatcgtgcacatattggggtggatcattccggagcccttgcacataccgcctaccgttacggtttttccaccgatctcgatttctaccgctgcctctttcttctcggtatctgttgtcatgatggcttttgctgcctcaaggcctgcctcgcggcttccctcaagcttcggtgccatagcttttactccgtttgcgatacggtcgatcggaagctgcattccaatgacacctgtggatgctaccagtacgctgtcttccgggatcccaaggctttcggatgctgccttggcggtttccctgcaatagccgaatccttcctcaccggtacatgcgttggcgattccgctgttgcagatcacagctcttgcacccgggtggttgtatacaatgtcctgatcccatcttacaggagctgcttttaccacattggtcgtgaaggttcctgcagccacacagggaacctcactgaataccatggccatatcggtacggcctttatatttgatctctgctgcagttgacgctgccttaaaaccttttgcggctgtaacgccgccgtcgatgatcttcatattatatatctcctctcaatggtgatgccggatcgaatatcgcagttcattcgtttaaagtccttcggcatcccccatattttatttgtgatctgcctgttttacgggcacatcggaatctgtttcagtccttcgttctcgtcaaatccaaacatcaggttcatgttctgaacagcctgtcctgctgcaccctttaccaggttgtcgatagcgcccatcatgatgactctctttgttctcggatcgatcttgaagttcacgtccacaaaattgctgccttctacatttcttgtctgcgggcatacatccttgttcaggacacgtacaaagaactcgtctttataatatttgtcataggctgcttttacttcctcataggtaacatccttggtcagggaggcatatgctgttaccaggattccacggttcatcggaacaagatgcggggtaaagttgatcatcacttcctgtccgcatgcatatccaagctgatcctcgatctccggtgtatgtctgtgtgtggcaacaccgtaagctttgatgctctcgtttacctcacagtagagattcggaaccttggctcctcttcctgctccggaggttccggacttggcatcaatgataatggtattcggatcaatgaggccttcctttaacagcggataaatagacagtgtggagcatgtcggatagcatcccgggttggcgatcagccttgcattcttaatatcctcacggttaatctcgcagaggccataaacagcttcctcgataaactgcggagccttatgctcgatcccgtaccacttctcatattttttcacatctttaatacggaaatctgcgcttaagtcgatcaccttacatttggaaaggatttcttcattaataagggatgcacaaaggccctgtggtgttgcggtaaagatcacatccacctcatctgcaagtgcagccatgttgtcatccatacatttggcatccaccagcctgaaaaaattctgataaatatctgcatactgctgatctatgtagcttcgggagccgaaccatttgatctcaacgtccttgtgtccaagaagaagtcttacgatctcatttcctgcgtatcctgtcgcaccgataattcctgctttaatcatctttcacattcctcctctgccgtttttctacggctttatacaccctgcagaagcgcttgctattcttatttatgcctcttttttatgtcttctgatatctgaatcttctgcacaggtcagacggacatcttaaacctgtctgtactgccagctcatatgtccgccttatcaatggatagattatacatcttctctgcatattatgcaatagtcattttctttgatttttcacggtcttttctgtttttcctgtatttccttataatatcgcctacttttcgatgcatttttatgcaaattttttttcatatttttcaaattatctcttgcatatttataaaatctggtgtatattaagccatgtcgacaggacaaccgaaaattttgttttgttgtacatgaatatttattcactctggtaaagttataaaacagcataatttttttccagataacgtaaaaaaattcaccgtcccggaaatgtccggagcgatacaaaatcaaaaaaatcccaggaggacatatattatgaaagaaaaagttgttttagcgtattccggtggtcttgataccacagcccttatcccgtggctgaaagaaacctttgattatgatgttgtctgctgctgtgtaaactgcggacagggaaacgagctggacggtcttgaagagagagcaaaaatgtccggtgcttccaaattatatatcgaggatatcgtcgatgagttctgcgatgacttcatcatgccgtgtgtagaggctggtgctgtatacgagcattcctatcttctcggaacttccatggctcgtccggtcattgccaagaagctggttgagatcgcacgtaaagagggtgccgttgctatctgccatggtgctaccggtaaaggaaatgaccagatccgtttcgagcttggcatcaaggctctcgctccggacatcaagatcattgctccatggcgtatgacagatctgtggaccatgcagtcccgtgaagatgagatcgagttctgtaaggctcatggcatcactcttccatttgatgcaagtcacagctacagccgtgacagaaacctctggcacatcagccatgagggacttgagcttgaggatccatcccaggctccgaactatgatgacatgcttgtattaagtgtaacacctgagaaggctccggataaagaaactgagatcaccatgacattcgagcagggtgttccgaaaacactcaacggaaaagcaatgaaggtttccgagatcatcacagagctgaacaagcttggcggtgagaacggcatcggtatcgttgacattgttgagaaccgtgttgttggtatgaaatcccgtggtgtttatgaaactcctggcggaacgatcctgatggcagcacatgaccagcttgaggagctgatccttgaccgtgagacaatggaagccaagaaaaagcttggcagccagtttgcacaggttgtttacgaaggaaaatggtacacacctctccgtgaggctattcaggcatttgttgagtccactcagaaatatgttaccggtgaggttaaattcaagctttacaaaggaaacatcatcaagaatggtacaacctctccgtacagcctttacaatgagtctcttgcttccttcacaaccggtgatatgtatgatcatcatgatgcagacggattcatcactctgttcggtctgccgctgaaggttcgtgccatgaagcttgcagaagttaagaataaccagaatcagaactaattttgttggacattgttccgacagatcataagaatgccccgggaagctatataagttccccggggtcttttgttatatacttctttgatcacataatacctaataaacgaaaggattttttatcatgaactcacagaaaatgcctctgaaaaattctctctgcctgcttctggccgcaacgatctggggaatcgcctttgttgcccagagtgtgggcatggaatatgtcggacccttcaccttcaacggcgtccgctccctgatcggtgccgctgtcctggttccggtgctctttatcctgaaccgttccggaaataaatcctctgctgccacagactccgcaataccggaatcctcatcaacaccttcagaaaaagcggtatcccccacgccatataacagccgtgacctgtggctgggcggcattgcctgcggatttgctctttttgctgccagcagcttccagcagtttggtatccagtacacaacagtaggaaaagccggcttcatcaccgcctgttacattgtcatcgtcccgatcatcggaattttcctgaaaaaaaaatgcagtccctttatatgggcagccgttgtcatggcactggtcggactttatcttctctgcatcacagacggattttccattggcctcggagatattctggtgctggtatgtgcttttctcttttccctgcacattctggtgattgactatttttccccgaaggcagacggtgtaaagctttcctgtatccagtttcttgtctgcgggatcctgtccatgatcccggcacttattctggaacatccgcagatttcttccattctcactgcctggctgccgatcctgtatgccggtgtgatgtcctgcggtgttgcctacaccctgcaggtcgtaggccagaaaaatgtgaatcccaccgttgcttctctgatcctttctcttgaatcctgcatctccgtgcttgcaggctgggtgctcctggatcaaaagctttccataaaagagcttcttggatgtgtcatcatgtttgcagccatcatcctggcccagctgccagaaaaagaaaaagataataaataaaaaacaggcagccggtttggtattttaccttccggctgcctgtctgcatgtttcttattctgctgcttcttctttcttaatgaagttattataatgtgccttgatcttctcaaagctctcctgactgatgtcgtgctccatcttgcaggcatcctccattgcgatctctgccggaaccccaagtccctccagcatcctggcaagaacaatgtgacgctcataaatctgattggcgatctccgcccccttctccagaagtgtcacggtaccgtaacggtccatggcaatataaccatcctcacgaagaagcttcattgcgtgactgacgcttggcttggaaacaccaagtctggtcgcaatatcaatggaacgaactcctcctccttttttggataaaaccagaattgattcaagataatcctccgctgactgtctgatctccatataaaatcctccctgcaaaaatttaactctatatagaccctctaaagggacctgaagcccattctttccctgttctacaggcgaatattaacttttaatataccgcttaaaggatgttgtgtcaagcatttcgcacatgtttatcttgacattaaaaataatttccccgataatagtagctgaacaatatatctgttctatagcagcccggaatcctttccagtagtgctgtcttttgaacagtaaagaaaggagattttttatgctcaaaacccttctggcccaggtcagggagtttaaaaaggcatcgtttctcacgccttttttcatgatcctggaagttctctttgagactctgatccccctggccatggcttccatcattgataagggtgtggaagccggaaatatcggccatatctatcggatgggtgcagttatggtagctcttgccctgtgcggactctggtccggcgtcatgggaggaaaatacggagcactggcctccacaggctttgccagaaacctccgaaaagccatgtacaccaacatccagaccttttctttttccaacatcgacaaatacagcactgccggcctgatcacccgtcttaccacagatgtgaccaacctgcagaacgcctatcagatgatccttcgtatgtgtacccgtgcaccggccagtctgatctgtgccatggtcatggcatttcttatcaacgcaaagcttgcaagcatctaccttgtcgctgttatcttcctgggaggctgtctgatctttatcatgcagaaggccactgtatacttccaggccgtattccgtaaatacgacgacctgaacgcaagtgtccaggaaaacatcggcgctgtacgcgttgtcaaggcctatgtccgcgaagactacgagatcagcaaattccagaaagcctgcaacaaagtatacgaaatgttcttaagtgctgagaagatcgttgtcatgaacatgcccctgatgcagtttaccgtttatgcctgtatcctggggatcagctggctcggcgccaaaatgatcgtaggcagctcccttactaccggtgagcttatgagccttctcacctactgcatgaacattctcatgagccttatgatgctttccatggtttttgttatggtgacaatgagtattgccagcgcagagcgtgttacggaagtcatcaatgatactgctgacatcacagatccggaggatccggtaacagatgtcccagacggaagtatcgtcttcgatcatgtaaatttcagctataagaaagacagtcaggaacccgttctgaaggatatcaatctctcgatccgctccggcgagaccatagggatcatcggcggtaccggaagtgcaaaatccagccttgtcaacctgatcagccgtctttatgacgtaacggatggttctgtttccgtaggaggcatcgatgtccgtaaataccatctggaatctctcagaaatcaggtttccgttgttcttcagaagaatgtactcttctcaggaaccattctggaaaacctccgatggggtgacaaaaatgccactgaggaggaatgccgccgcgcatgccagcttgcctgtgccgatgatttcatcgaaaaaatgccggacaaatacaataccttcattgaacagggcggctccaatgtttccggaggccagaagcaacgtctctgtattgcccgcgctcttctgaagaagccgaagatactgatcctggatgactccaccagtgcggtagatactgccacagacgcaaggatccgccgtgcctttgccgaggagatcccggataccaccaagctgatcatcgcacagcgtgtttccagcatccagaacgcggaccggatcatcgttatggataacggtgagatcaacggttttggtacccacgaggagcttcttaagactaacgccatttatcaggaagtatttcattcacagaccggcggcgccggtgattttgacgagggaggtgaaccggcttgaaaaaacagaacatgaaaggcccgggcggtcctggcccaaggggtatgggaacaccggagcagccgggaaagcttctgggacgccttgcccgttatatctttaaaaactacagtatccatatcgtgatcgtggtgatctgcatttttgtcagtgttcttgccaatgtacagggaactatgttcatgaaaaccctgatcgaccagtatatcacaccgcttctctcagcagatacaccggatttcgggcctctggctacagccatcgcacgtgtggcatgcttttacgccattggtgttattgccacctatacttataaccgtatcatgatcaatgtttcccagggaaccttacgtaacctccgaaacgatatgtttgcaacgatggaaacgcttcccatcaaatattttgacactcacgcacacggcgatatcatgtccatctacaccaacgacattgataccctgcgccagatgatcagccagagctttccgcagctgctttccagtgtgatcaccatcgtcagtgttcttgtaagtatgctgatcctgaatgttccgcttactgtagttaccctgcttatggttgccattatgatgactgccagccggaagcttgcgggcttaagcggaaaatatttcctggagcagcagaccaaccttggtattgtcaatggttatatcgaagagatgatggagggtcagaaggttgtcaaggtcttctgccatgaggacgaaagcatccggaaattcgatgaactgaacgaccagcttttcaccagcgcagacaatgcaaaccgttttgccaacatcctgatgcctgtggtcgcacagcttggaaatggcagctatgtgatctgcgccatggtgggcggtatccttgctatcaacggcatcggcagcttcacacttggcgggcttgccagcttcctgaccttcaataagagcttcaacatgcctatcaaccaggtcagccagcagttcaacagtattgttatggctcttgcaggtgcaaaacgtatctttgatcttctggatgaaaaaccggaagtggatgaaggctacgttactctcgtcaatgcaaaagaggaaaacggtgttcttaccgaatccgacaaacgtaccggccgctgggcatggaagcatttccacaaagctgagggtaccactgattatatcgagctgaagggtgatatggtcctggaggatgtagactttggttataattccaacaagatcgttctccatgacatcaacatgtatgcacagccaggccagaagatcgcttttgtaggctccaccggcgccggaaaaaccaccattaccaatcttctgaaccgtttttacgacattcagaagggtaagatccgttatgacggcatcaacatcaccaagatcaaaaaagatgatctcagacgctccatgggcatcgttcttcaggataccaacctgttcacagcaaccgttatggaaaatatccgctacggaaagctggatgccacagatgaggaggttatcgcagcagcaaagcttgccaacgccgacggtttcatccgcaggcttccgcagggttataatacccttctccgcggaaacggtgcaaacttaagtcagggccagcgacagcttctctccattgcccgtgcagccgttgcagacccgcccgtcctgatcctggacgaggccaccagctccattgatacccgtaccgaaaagcttgtacaggatggtatggataagctgatggaaggcaggacgacctttgtgatcgcccacagactttccacagtacgcaacagtgactgcatcatggtcctggagcagggacacatcatcgagcgtggttcccacgaggagctgcttgcacagaagggccggtattatcagctgtataacggctgatccaggctcacagttattttcgatctaaaatattcaataccaaaaacatgcagggtgtatcttttctgatagtcctgcatgtttttttatgctataatctttgattgaaatctatttttccggaaaggagtctccgtatttttatatatgaaacaaactgaagaatattactacggcaaaatgtcgaaagataaacaaaacgtgtaccgtgcaatgcttcacgggcttatggagctttccgacgagttcctgatcccgcaggtaccaaccaccgatggaaactggctctatgatgtatttttccagcttcgtctggatcacccggagattttctgggctgtggggtttaaataccgttattacaaggactcgccaaatctgatactgattcctgaatatatcttcgacaaaaataaaatccgggagcatcagaaagccctgggagcccgcgtagacaagcttgtgcgcaccgccatgaagttttccgagtgggataaggaaaaatatgtccatgacttcatctgcgaaaatatccgctacgacaaactgaaaaagccatattcccacgagatcatcgggcctctgggccatggtgtcggtgtctgcgagggaatcgccaaatccgtaaaggtcctctgtgatgcccttggtgtatggtgtattatcgccatctgcgggaacaatccggaaaaagggatcaaataccgtcatacctggaacatcgtccggatcaacggacagtactatcatctggatgccaccttcgataatactctgggcaaaaacgaagacggcttaaccagtatccgttacgattattttaatctggatgacaaaaacatcttccgtgaccatgaaccactgatcgctccggcacctccctgcccggatggaaaccacttttattaccgtgagaaaaagctatccttcaccaaattggaagacgtatacaaacgtgccctccaggccgcaaaaaaaggccgcgaattcaccttccactggcgaggcggatatctcacccgtgaagtcctcgcagaccttgtagatcagatccaggccgcaggaaagacacgggacaaaaaagccatcatcacactcaactggcctcaggctgtacttcgatttcattttgtggaacagcaggcggaagggaaggtgtttattgaggaagtgaatgaaggggagaaactgtaacgtcatttaagaaattcgatagagtcaaaatgccacatatcattatgcatatgtggcatttttctgtgaatataattctaaaaattaaaagactttccataaatcagatttatagaaagcctcttaagcactgcggataacaggacttgaacctgcacggttgcccactggtacctaaaaccagcgcgtctgccaattccgccatatccgcatattcaattatattttcatcctgtctgatgataaaaaaataacggaaagcaaatgctttccgctaatgaggcatcggggattcgaaccccggacaacttgattaaaagtcaagtgctctaccgactgagctaataccccataaaaaggactgggctagctggattcgaaccagcgaatgcagcagtcaaagtgctgtgccttaccgcttggcgatagcccaatgggcgaagggtggatacagggattcgaaccctgggcctccagagccacaatctggcgcgctaaccaactgcgctatacccaccacaacgtgcctgaagggattcgaacccccgacccacggcttagaaggccgttgctctatccagctgagctacagacacatgctctcttctcagagaagcgggtgatgggaatcgaacccacgtatccagcttggaaggctggtgttctaccattgaactacacccgcatgcttgcggtaataagtttacagcagtcggggtgacaggattcgaacctgcggcctcctggtcccaaaccaggcgctctagccaagctgagccacaccccgatgtaccatttacttatggtttttattaagttgttgtcgtcttcgtttgtgtttcgttttcgtttcctgcctgacgacaagtgatattatattatagcaatctacaaatgtcaacaccttttttgaatttttttaaaaaaactttttttcacgttttttccgcctatttaaaggttttcttgtcatttgcgactggcttatggtatcatgaaaccataattaaagtcaagaaaaaaagcaaataataaggagatgtttttacatggatataaaattatttcagcagaagcttaatgacatctgtgccatcgctgaggaaaacaataagcagctctcccagcagcagatccgtgatcatttcgatgaatcggatctgagcacttcacagcttgtaaagatcctgcagtatctcaaattaaaggggatcaccatcgaaggcgccgatgaagctgccggcgctgccagagcagatgctgtttcatccgaatccagcgacaaggacgagcttccgggtacccgtgctgctcttactgccgaagaacaggcttatctcagtgactatatggaaagcttttccccggaaggacttgatccggatgatcttgcgtccctctttcatgcctttgcaaagggtgacactgctgccgaaggtgcactgacacagttctacatggctcaggcagcccagatggccgctgaactgaactgtgaggaaatccacctggccgatctcattcaggaggcaaatctggcccttctggcgtctctcaaagaaactgccccacaggagaaaaacgacacctggatgcgtggtcgtatccgcagtgggatccttcatgccattgaggaacagacacaacagaaattccgtgacgactatctggtatccaaggtagaaaacctggaggctgcggttaaagaactcacagacgatgatgacgccaccaaattcaccattgatgagcttgccgtgatcctggatatgaatgtggatgagatccgggatgtacttcgccttactggagatgataaataaagctttcttcatattcttcacaaaaacgggtctgacatagcttgtcagacccgtaatcttaatattctttatgctttttcttcccgtttcagctccgccggttctgccagatggatctttccttcccgaaatatgtggataaatacctccgccatatccggatcgaactgttttccttcctcttctcttatgatccgaagagctttttccactggcatcagttccttataacaacgtttggatgtcatggcatcaaaggaatctgcgatgcagaggatccttgcagatgccgggatatcttctcccgcgatcctccttggatagccgtttccgtcataacgttcgtgatgaccgataaccgcagggataacataatccagcgacggaaggtgacggatgatcccgatggacgcctccacatgacctttcatgatctcatactcttcatccgtaagcttgccttccttgttcaggatatgctccgggatcccgatctttccaacatcatgaagaagcgccgcctgacggatgatctccaccatttccgttgtatagttcagcgccttcgcaagacttgttgcgtaataagccacattgttggaatgtccgaaggtataatgatctttggtatcaatggctgcagtcaacgcatagatcgtggattcataggactgataaatatgttcatgatcggatttcttacccgcattttcttcatccaggctttccttcagcatggtgtcaaaaatctcgatgccgtttttaccgctgcgctttacatgatatactgccaggtccgcattatccaagagctcctttgctgagcgtgccgcataaggcgccgcactgatccccacgcttaccgtaaggatcttcagcttgtagtctgcagaatcgttgcgcatatgcaggatctgcttctgtatggattctgccagatttctggcggaaaaaatatcgtaatttggcatcaggaccgcaaattccttggcactgtgacgtgccacatatccctgttctcccacacttgcctggatgatatctgccacctttcgaagtgcaacatctccctgctgatttccgtacagctgattgtacagcttgaaatcatcaatattgaacaggatcagtgcaagcgaaccctctttatttttttcgtattcctcatccaggatctcataaaaatatttccggttcagaaggcccgtcagttcatcggtccttgcctcagtccatgccgcctcataaagtctggcatttttgatggcaatggaagctaccgaactgaccgaagacagcatggccagatcattatggttcagatttctgtgtccgtcaccggaaatcgcaataatcccggccagatcatcattctggcgaagacctgcacagtattcgatacccagctctgaaaacatatgtttttccgactcccacatggatttgtaggctgtggaagaacgaaaatcccggatcaccacacagtcctcatttctggtaagccaggtgaccaccggattatccgctttcagtgaaaaggtcagatcgttcaacggacggttgctgtaaacagcctgatattcccctgattttttgtctctcagacaaatatagatccgtcctgcattggtagtttccttcaacacatttaccgtattgcgcaggatctctcctacccggagtgtcctggatactgactggctaaaatctttcagctcctgagactgctggatctcttttttgataaaaacattgttcatcagacatttccacagcactgtgaccagccatgcagatataagaaaaacgaaagaaaagatcagcacatgatactcactggctgcagggagcagcattcggatataactcatcaggtacggtgaaagattgataaacagtactaccgtcaggaccacgcccacaccaaagcaaaccccatctgacgcaagacggcgcatctggaacagccgtcttctggtcagtgcataaagcatcaggacagcattgatcagaccgctgacaatatcgatggggaatccggaaaataccggcactgccagcgcaaggtttcccacaaaaatgatcagtatccccacaaggatcggttcgatctgtttgcggtatccgggatgtctccggcatccgcggtacatggtgataaagatctggataatggtgattcctgccaccacaaagaacagaaggaaccagggtgtgatcttataaacaaaatgcgcaccaccgtttttacggatcagatccggccagcgcaggatgatcccgcccgggatgttgattgcaaaaagcagcagcatcaaaagcaatgggatcttgctttttctgcccatacgcactcccatgaattcactgatgaacacatagtaaaaatatggcagaaacaggattccggccagagacacataataccacaggatgtaagagggtcctgcctccatacgcatcagaaaagagcccaacgtccagcagagcattcctcccagcacacacatgaaactgttgatgatccggctgcgcttaccagccagaagagtcagtatcataaatgtatagaaaaaaactgaaatgattgaaaatgatatatagctttccatagttacttcctcatattcccgaatccgatctcatcctgcagtctcaaaagttccgccacctcataataaggagtgctcatatgccgtggtttccgtccttttctggactcatacagatgaaaggtaccacagcgcaggatggtcaccacaaggggatccattcccaggattttcttcagatcccggtaatcctgatcgatatatttgaaatacgtggtcagaagttctttcagaatatccgtgctcatagcctgatacatcagcgcttctttttttacttctatataaagatgcagatatgggcgttttttctcattatattctttcactgcgatccaatccgtaaccggctgcccggacagctggatcacacttttgataccattttccgaaatcctggtaaagcctgcgatatcaatgatccacggaacacggtctatgtactcaaatcttgggatctgtgtccgatcctcctggttggtaagacccacgcatcgatacatatctcccacacggtacctggcaaaggctccgcccttcaacacagtgatcacaagctcatatttctccccgggaacaacctcatccataagataggtcggaggagtgaacgtgggatcctcataattatggagcatatccttttcggtgataaattcataaaagcaggtatccgggaaaaagtacattccgttcctggtccaggtctcggttcctataatggaaggttccgttcctgcaaaaagctccatgggccgaactccccacatttcctccagatcatccttatagcactggttgtcggttcctgccaccataaatcccttcaggtgaaaaaggtctttcggaagaagctcccgtttctccttcttacagatctttttggcattcaggatccttttcagcatctttggtttatactgcagaagttccgaaaaggaggttttgctttttcctgatgatacgcttccggtgaggctctggcttactgcataggccacacttccaagtccgaagaaaaattccacgtcctgtttcatggccatcttgaagccctctttgttccgctcaccaaagctcatatttaccgcatcttccacttccggaagaaaacggatgtcgatatcttctttcagcgccagtggaaaaaggccggtagcaaaaggcaacggtgccagtccgtaaaggatcttgtccgtttcctccacatcaaatttgcccttttcacggcttgcagctaatatgaggcaggcaactacattgttcctgtaggtatccagcatacttcttgtgtatggtgctacctttatcggatggcgtccgccttcccaggtcgtctgtatccagatgatcggattccccggaagagtttcacttctcttctggaggagcatatccgcataatcctcataagtggtaagaggtaccagccgacggaactcgtcgatcccggacggtctcctgcccttcagaatgcttttgcccagttcacagtctgaccagagctggatctgctcttccatcagacgattctggatcttcatgtaatcctgcattgtcagatcaagaaatccgcaatattctttccagatagcatcatactgctgttttcgaagcttttcgccaagactcaccgccttttccccccttttcgccatgtttttatgcaggcagctgtactgtttcggtctgggatcagaaagggagttgtctgctgatacgctccgtaattactgaatgtttccggaaacacgatcctgtcctggtaaaaaatgtacaatatgttccacacgataaggaccccaaaagcccccattgccttcccggatcccagaaatccggccaggcaaaaataaaatccggcgaaccacagaacgccaggatgtcggcagagtgcataaacaccccctgtataggccagcctttcatgattttctttgacatatgtctcatcaaagggcagcgcaaaaaacaatgtatagatcaacagtcccagaaacaggagcgctgctgccagaaaaacagcagaaataaaaaaagaacttccccgccgcggccagcagttccggatcaccagacctgttgacactgcgatcaggaaacatcctatgctaaaaaacgggtggagaaagctttttttcagtcggatactgttatgatcatacaggaagcagcataaaaagccgatacttcctataataaccgcagtcatgcgtattttcccccttcatttatgtaaagcggaccttctcattccgctctgctgcattctcaggaacgagacccattcatggtcagtaccctaaagaatgctctatattactagaaaacaactacttgttcattatatagcacatagctgactttcgcaatcgttttcgactaatatatgctgaatattggcgcaaattttatcaattatgacagtttatttgttttttctgccggaatcagaggtaacggatctctacgtgcatttcgccctttccatctgtctccattactgcatagcttggacggcgtccccgttgtctgggataagccagacttccgggatttaccagaagcacacctgcttccttttcaacaaccggaacgtggatatgtccgaaaaaagccgcattgcatccccttgagcgggcagcttctgccagctgatcaaaggccatggatacaccgtagtaatgaccgtgagttaccaggatcttatttccctcgacctcgatcacatcttctctcggaagatccgagaaaaaatcattatttccggacacaatactgcagggacattctgcaagggcttcgatataaaattctctgccttccacatcgccgcaatgtaccagcatgtcaaaaggagcctcccggtttaccgcgatctccaggttttcatctcttccgtgagtatcgcttacgatcagcaccttcatacaagctcttcctttataaggcaaagagcttttccacgatggctgatcctgttcttttcttccatggaaagctctgcggaagtacagccatattccggaagataaaagatcgggtcatagccaaagccattctcccctttttcctcgtagccgatgcggccttccatggcagcacggactgtctttcttctgccatccgggaaaactgccgcaatagcacatacaaaacgtgcagtacgtttctcatcaggtacaccttccagacgctggatcaggtttgcgtttttaatatgataagaagtatcctcacccatatagcgtgcggaatagattcccggctctttgttcagatagtcgatctccagaccggaatcatctgccagaacgatctcgccagtcattttactgattgcttctgccttgatcatggcattttcttcaaagctttttccattttcatcaatatccgcatggatcccggcatccttcagggaaaggatctccagagaaggatccgcaagtatccttcggatctccttcattttatcctcatttccggtagcaaaaatgatctttttcattctttaatacttcctttcttcggcggacgtggtccaagaaactggtaataataggttttcatcattccgttataaatcttacggtttttatctgcctttcggccgatgtcattctctgccttgtcataggcagtgatcagatacatggaccagcgatccagccccttatagctttcaccgatctcacggtacaatgcagggagattggatttttcttcgatccgctcaccatatggcggatttgtcacgataaaaccaaagggtttggaatggcggagttcactgaccgggcgctgctggaaatggatcagtctgtccactcctgccatttttgcgttggcgcgtgctgccttgatggcagctgcatcgatatcaaagccctggatatcggtttcaatatcaagatttacacgttctctggcttcttctcttgcatcctcccagcattccttcgggatcagatgctcccagctctcggccagaaaatgacggttcagtcccggcgccatatccgctgccatcattgccgcctcaataggaaaggtgccgcttccgcagaacggatcgacaagaatacggtcctttttccagggagtgagcatcaaaagagcactggcaagcgtctcggtgataggtgccttgacagtcatctggcgataccctctcttatggagggatactcctgaagtgtcgattccgatcagagctacgtctttcataaaggccacacggataggaaattccggaccatcttccggaaaccaggaaatcccgtagatgcctttgagacgctctacaatggcttttttcataatggactggatatcagatggactaaaaagcttacttttgatggagtttgccttggctacccagaatttaccgtttttcggtatgtaattctcccatgggagagccttggtcttttcaaaaagctcatcaaaagtctcagcctttacttcgcctattttcagaagcacacgttctgtggtacgaaggaacagattggcgtctgccacaccctgggcatcagcctcaaaggttactcttccgtcttccaccctggtcacttcatagccaagatccagtatttcacgcttcagcaccgcctctgttccaaaatgacagggcgccgttaattcccacagattcataaagtgatctcccgtactgtatttccttcaaaatctttaatggtaaaaattccgttctcaaggattgcataggtcggcgggttaccttcctttggaatggatacggaacctgggttcagaaggatataattccccatattttctgccttcagcacatgtgtatgaccgtggatcagaacgtctccgtccatcatcggcggaagattatccttattatagatatgaccgtgtgtggcgtacatcgtttttccttcgatggcaaggatacagtaatctgccataaccgggaagtccaggaccatctgatccacctctgcctcacagtttccgcgtactgcatagatctggttttttctctcatttaaaaggcggatgacttcctttggtgcgtattccttcggaaggtcatttcttggtccgtgataaagcagatctcccagaagcaccagtctctccgccttctccttgtcatatgcttccagcattttccggcaataatatgccgaaccatgtacatcggacgcaaacatatatttcataatcttttctccttgtaatttgtgttggtttttatctctgttctttacattatcatgatttcctttaaaatacaagatttgttacagatatgcattcgcaatctgatttgatattgtccgctttttttatccgcacacaagatttctccctctgtaggctgcaaatccaccaatcacggacctagtacgacagccctgtcttgccaggctccgggcagcctgcatgctggcgccgccgcggtcgcagtaaaatatcagcagcttatctttgggaaaacgatatttctgatcctgttttttctcaagatattcctccagctctctgtatggaatatttaccgcgttccggacatgtccccttctgtaggcggcagaatcccggagatctatgataacagcgtcgctgcgctccacataataatccagcatttttgcagagatagtttcgatctgaaacatggaaaaaatctcctctttttggtatattatatggaagcttccgggtgaatgttcccttatatgtatttaagcgggaaaagccatctctgacttttcccgcttttcttatcctttaatatctgtcagagcctctgtccttctcagaatcatattcatcggaaattttgtttccgtagctgcttttggaactgtttctggaagaatttcccgaactgttcttagagctgttttttccgcagtttctggaagcactttccccgtgattttttcctgcataattagactcatttctgtctgtttcgtaatttttcgccatttgaattacctcctgatgaagttgattttacggctttccgaagctttctgccgctttttattacaggaaatagtatcccaaaaagtttggagattattcgccaaaatcatattgcttttttttccagtttatattataatcattcttgtaaaaagaatttacccttcaaaaattttttttacataaccccttatttaattatttatactcccctcgaaacacccggtagctcccctaccgggtgtttctctatacaaaaaacaagccgccggatgacgatcacaatcgctccggcagcttgttttttatccgttgatcggatttacatgcaccatacagtgctttacatctttgaatttattctcgatcgtatgatgtacattttccgcaatatcatgtgcatcaaaaagggaaatatttccatctgctgcgatctcgatatccacatacatcttggatccgaaaagacgggttttaagaaggtctactcttctgacgcccggtaccttgagtatctctctcttcatggattcctccgtttttgcatcacaggaatgatctaccatcttgtcaatggcatccctgaaaatgtcgatcgatgccttggcgatcataacacagatcacgatactggcgatcgggtccaggatcgggtatcccagtcttgctcctaaaataccgacaaaagctccaatagaggaaagtgcatctgaacgatggtgccatgcatctgccatcagggctcctgaattgatcttctttgcagcacctcttgtataccagaacatccactcttttaccacaatggataccactgctgcaatcagtgcaagtgttcccggaatggcaatggttccgccggatgtgctttttacgatatcacgggcaccggtaattccgatcccgaggccagtgacaagcagcattcctgcaaggacaatggaagaaacacactccattctttcatgcccgtactggtgctctttgtctgatttctttgtagaaagacggacaccgatgatcacgatgaaggtgcttcccacatctgatgcagaatgaatggcatccgagatcattgctcctgaatgtgccacaatacctgcgatcagtttaaatacagataataaaagatttaccagaatactgatcccggataccttcattgctgtctgctgttcccatgaagctgttttttctgtatcatgtataattgttttgttttctgtgtgttccataaacagaatctccttttaaatatatgatcaggttcttcttatggcacaacattttccgtgaaaaaaccggcggttccttcactactcgctgcagtgcgattttccgccggtgttctttcttttctgtatagggatatcccagcttctaccttctgttccatccatatttttgcagtaaaaaagacatacctgcgaaacatacactgtcccgcagatatgtctgaaagcaaagtcacattctgcttcacctcatattccgtgaatgcaggttctttgcaattacgtttaaatccatatccgctgccgcttcctgcggcccggccccatgccttcgataaatattttcgattccgaaaagcatcgcctgctcagtttgtactgttgatctcgcatcctgttcgaatgtaatgcagtgcaaagagaatttttgcagtcttacgggtctcccgctcaacttctcagaaaggatacaccatatgccctctgttagtcaagccaaagttttttattttacaggtagatatcttcaactttctgtttattccatgtctggaaacatgcttcgcactgcacagttctatatcaaataatagatcctcagttgtttgtcaaaaaaccgggagcggataaatccactcccggtcaaatctacgatctgtattcagttggaatgatcgattatgcctgcgggccagcagcaacgagtgctttaccagcagcatttccttcatatttaacaaagttcttaacgaatcttgcagcaagatctttagcctttgtctcccactctgcagcgtctgcatatgtgtcacgtgggtcaaggattgcaggatctacgcctggaagctctgtcggaacctcgaagttgaagaatgggatcttctttgtcggagctttaagaatagatccgtcaaggatagcatcgatgataccacgagtatctttgatggagatacgttttccagttccgttccatcctgtgttaacgaggtatgctttcgcaccgctcttctccattttcttaacgagctcctcagcatattttgtcgggtgaagctcaagaaatgcctgtccgaagcaagcggagaatgtaggagtaggctctgtgattccacgctctgtaccagcaagtttagctgtgaatccggaaaggaagtagtactgtgtctgctccggtgtcaggatagatactggaggaagtacgccgaatgcatctgcggacaggaagataacttctttagctgccggtgcagaagataccgggcgaacaatgttctcgatgtggttgatcgggtaggaaacacgtgtgttctctgttacgctcttgtcagcgaagtcgatctttccatctttatcaagtgttacattctcaagaagagcgtttctcttgatcgcattgtagatgtccggctcagactctttgtcaaggttgataaccttagcgtagcatccaccctcgaagttgaatactccgttgtcatcccagccgtgctcgtcatcaccgatcaggagacgcttaggatctgtggaaagtgttgttttacctgttccggaaagaccgaagaagattgctgtgttctctccgttaaggtctgtgtttgcagagcagtgcatggaagcgatgcccttaagcggcagatagtagttcatcatggagaacatacctttcttcatctctccgccgtaccatgtattaacgataacctgctcacggcttgtaatgttgaacattacagctgtctcagagttaagacccagctctttgtagttctcaactttagccttggatgcgttgtaaacaacgaaatctggctcaaagttctcaagctcctcagctgttggctgaatgaacatgtttgttacgaagtgtgcctgccaagcaacctcaacgatgaaacggatagccatacgtgtatctttgttagctccgcagaatgcatctactacgaaaagtctcttgttggaaagctctttcttagcaagatctttaactgcagcccatgcttcctgagttgccggatggttatcgtttttgtactcatcggatgtccaccaaactgtgtctttggagttctcatccataacgatatatttgtctttaggggaacgtcctgtgtagatacctgtcattacgttgacagcaccaagctcgctgacctgacctttctcaaatccctcaagctctggtttggtctcttcctcgaataatgtctcgtaagaaggattgtacacgatctcagttgttccggtaataccatactttgttaaatcgatttttgccatcttaacatttacctctcttctttaatagtaattatgatagccacctactcttgcaggttctcgtcatcctgccataggaattggtcattccaacatccctatccacaattatacataaattgtacgtaaaagcaaccaaaaaaattcattttccgcaaaaaaatgataaatctttaacagtgacgttttggtactgtcagattttactccatctatacttgactttttcagaataatggctacaatatatctgattatagttattatatatatttataatagcaactatatgattttaatatatagaaagaagtgatttctgtgtcagatattccggttaaacgtaatcatatgaaaatcccctggcacaactacgtaagcgccaggaacagccagcccatcaccgaggcttctctttccgaaaaagcttccctgatcggtcgtacaggcatgatgcttctctcctgtgggaccggtgcctggcgggtacggagttccatgaatacattgtcagaagcacttggtatcacctgttccgcagatatcggactgatgtctataagctacacctgctttgacggtgagagcagtttttcccatgcacttagtctgactaccaccggcgtaaatacttccagactgaacaggctggaacattttgtcagtgattttcctgcggagggtatccatatgagcggtgaagcactgcacagtcagttagatgagatcgagcggatccacgggctttattcccctgcatccctgggactggcttctgcactggcctgtggtgcatttacttttcttctgggcggtggcccgctggaaatgatcctggcttttgcaggcgcaggcatcggaaacgccatccgctgcaagcttggcaagcatcattttactctgtttatgtgcattgcagtttctgtttcctctgcctgtcttgtatatgcaggcttcctgaaactggcagagcttctgttccacatttccgtccagcatgaggccggatacatctgttccatgctgtttatcattccgggctttccgtttatcacaagcgggatcgaccttgccaagctggatatgcgttccggtctggaacgactggcctacgccattattgttgtaatggtggctgctgtctctgcctggctaatggcactgcttcttcatctgaaacctgtggatttcctgcctctggagctttcggcagctcagaggatcctgttccggcttctggcaagcttctgcggggtattcggcttttcggtcatgttcaacagccctgtccgtctagccgcagctgccgccttcatcggcgcactgtccaacactttacgtctggagcttgttgatcttgccggtttcccacctgctgccgcggcttttttcggagcactgacagccggacttctggcctccctcctcaaaacaaaagtgggatatcccaggatttccattaccgtaccatccattgtgatcatggttcccggactttatctctaccgggcgatctacaatctggggatcatgtccctgaatgtttccgcctcctggtttgcagctgcgatcctgatcatcgttgctcttcccctgggccttattttcgccaggatccttacggacaaaatgttccgctactgcacctgatgggcatacaaaaaggactgctttctgtagcttccggtcatcagctatccttctgataaccggagcaatacaaaagcagtccttttttgtacattctatttcattacgatctcatcagcgatcccgatcattttttccaggcggtccgcaaatttatggatggggagaaaaacgcccagtccgtcataacgttttccaccatcctccacagaatcctgcccataatacacaaaagctcttggaagcttcttctgaattgccatcatgatatcccatacagccgcataggcctgtgcctccgtttctttttcctttacgctgtccggaagctcatacaccagcagcacaccgatatgttcgcccattttgtactcttctacttccatggtatcttcatcataggcatggcgcttccggtagccatacgccagatacatctttacaccaggtttctccctgtatatcctgcgaaatcggtcgtaatccctgtcacttacatggattcccttttcccgcagaaaatttcctttttcatctgtgagaaataccggattctcctgtccatctgcattgaacctgaacggtgccagaaaagaatttcgcagaagatcaaacatactgttctgacagattgccataaggagagctgtcagatcacggtttttatatgcgtccagcaatgcataagcaaatttttccggaggaagatatccgcattctatgtctgcatccgcatccatggattcatagaaggtttctgtcagccgtctgcacgcctccggatccttcagaatcttttcgaacaaaagctccgccttttcctctcttggaaataatgtgtcgttttccacaagtcctcaccctttctaattcttacgtttactggaaaacatcagaataaagctgagcagaagcaaaacatccgatacccagattgccgggatccccagcctcatggacagatttcctccgccaccggctccaatggcaaaaaagaaaattattccgaaataataaagagcctgcttcagctgttccggacgtttttcacgacaatacacggacaacgccgccgtgccgcttcgtaaatttccgatgcacatagtgcttgcataggaataaccgcccaccttccggaaggtctgtacctgcatggcgcaggaaaaggataccagtacggttgccagcatatccaattctcccggcataaatcccacaacaaaaaggatcaggatctcgatcagcaggatcatctgcctccagtgaagtttttttgcatatttaaaggtactctggatccgctccgccgctacaacaccaatggcaaaggctaaaataggaaacagataccttaaaccgtctccccactgtcctgtcataaaattttggctcatcagaaccacgttgcctgtctgggcgttggaaaacacctcatctcttgtaaagtatgtgtaggcatcctgaaatccgccggacattgccagaaatacacttgtgataaaagcttctgacatctgccggtctgcgctctgcagctttctgcctcctgaaaccactctaaatcactcctgtcattgatttttttcctcgggtgtattatagtttgctcagaagcaaatgtaaaaagtattattaatatcgtaaacatattaaaatcatatcacaggatggagacaatacatgatcacttacgactactaccggatcttttattatgtagcccagtataagagctttaccaaggcagcaagagctcttcacaacaatcagccaaatatcacccgctgtatgaacaacctggagcaggagctgaaatgtacgctctttctccgctccaacaagggaatcgcacttacaccggaaggccgccagctttatgaacacgttgccctggcttttgagcagctgtccatcggcgaagaggagatccgccagaacggagagctggagcatggcctggtttccatcggcgccagcgaaaatgccctgcgtctgatccttctggaaaagctggagctgttccgcgagcaatatccccatgttcgcctgcgcctctttaaccattctactccacaggctgtacaggcactgaaaaattatgcggtggatttcgctattgtcaccactccgatctccatccgcaagcctttacagaaaaaaagtctcctgcgttaccgggagatccttgcatgcggaagcaaatataaggatctggctactgcccctatcagcatccatgagcttcaggatctgccctttgtaggtcttgcggaagggaccagcaccagagaaatgtatatgaattactttatggaaaaccgtgtttcttttcatcctgacatagaggcagcaactacagaccaggtccttcccatgatcgtccataatctgggaatcggcttttacccggaaccccttgcccgggaagtgatcaatgacgggaagatttttgcccttcagcttaaagagccactcccccagagggaagtctgcctagtcacaaacagcagtactaccatgagtactgctgtcaaaaaagccattgaatttattgtgtaaatccctgaggcggatcagccatttatatttattgctctactgtccgctcaatatgcatggcaagataaccgatctcgatagggtccagctttttcccaaggcttttgcccaggctctcgcagacatcctctgcgatcctgtaggattccggatatttttcttctatatattcattcatatccagcttcagtgtctcccctgtggagacacgggctaccatatatttgatatggttcatcatacggttgtaggacagggagatcacatcgatctttcttcctgtggccatctcaatcatggcgatacattcccgtaccgttcttgctgtctgcatggcaacagacaccttttcatctccaagtgctgagtgaatatgaagtgccacatatcccacctcatgctcgtcgatctcaatatccatccgctccttcaagatcttcttcaatacctccgccaccttgaattcactgtaaaaaagcaccttgatatcatccgtcaggggattgctgatctgctcatgattccggatacgtcccactgcaaaggaaatatgatcagcaaggggaaacaggatccttctgtctatggtatccccaaaggtcttctcagcttctctcaatatttcatctgcaatctccagaaattccggtgctacgctctttgccagttcttttgctgagccacgttctgtctcctgagccagcctgtaaatggtacagtctgccggagcctcaaaacgctggctgaccttctttccaaatcccacaccttttcccagaagtacatattcctggttttcttccatatttatggcaatgatgccgttattgttcaataccttgctcactctgtacatctttttccccaccatttttatatatcctgccgcttttccacattccaccactgtctgccccggattttcagtcgacatttttgtctgcagctgttgattttctttatcgtaacagaatctttcttttgtgtaaagtccttctgacagacagttattttctttgccacaggaaaagcgcgcccgggcattaggcgcgcttttcacaaaaccaatcctctatattattgctgaaaaattccctattcttccacagtctctactgcgaacagcggctctcctgccttgatctctccattggcaagaaggcgtactctctgattatcctcgatctctgtgcaaagaatcggagaacataaggacggagcgttttctgtaagatacgggatgtcaatcttcatcaacggctcgcctttttttacatgctgtccctgctctaccaggatctcgaagccttttccttccagctttacagtatcaatgccgatatggaggagcataggaagatctgtatctgtctggaatccgatggcatgctttgtgtcaaaaataaactctacctcgccgtcttccggagcacagatcaccgggtccttcggtgtgactacagcaccctctcccatcattccttccgcaaagccttcatccggcgctgtggaaaggtctgcggcgataccggttaccgggctgtagacaatcgctgttctgagaacctttttctctggctgcgtgctggcttcggatgtcggagctgtgttctgagcagcctcacctgtactttctgctgtacgctctgtatcagactgagcctgattttccgcattgtctgtttctttctcatttgcaccttcaaaatattcattcggcgctgtctccagataatcctccagcttggatttgatcacagttacctgcggaccgtagatgatctgcacgccctggccttttttcacgattcctctggagcctgttgttttcagaatgtcgtcgttaactcttgctgcatcatggacggtgatacggagtcttgttgcacagcagtccacatcactgatgtttttctttccgccaagaccggctgtgatggcttcacttaccggatctgcggatgtgcttcctgctgcttcaccggcttttccggcttcttttcttgcgtttacatctgcttttgtataaagctttgtttctgtgtcgtcatcctcacgtcccggagtcttgaagttgaactttttgatcaggaaggtgaagatcacataatagagaataaagtaaatgatacctaccgggataatcctgagccagcttgtctttgcatttccctgaaggatcccgaacaggaacagatcaaggaaaccgccggaaaaggtaagtcctactgcaatgttcagcatatgtgcgatcatataagccgcgcctgcaagaacaacctgtaccgcaaacaatgcaggagctacaaacaggaaagagaactccagtggctctgtgattcctgtaagcatacatgcaagggctgcggaaagaagaagtccgcctgctgcttttttcttctcaggctttgcacagcggtacatggcaagagctgctcccggaagaccgaagatcatgaaaatgaactctccggaaaaatatcttgttgcatctgcgctgaaatgcgctacatttgcggaatctgcaagctgggcgaaaaagatattctgtccgccctgtaccatctggcctgcaacctccatagtcccgccaacggctgtctgccagaatggcatataaaatacgtgatgaagtccgaaggggatcagcgcacgtttgataataccgaagatcagggttccgacatagccgctgcctgttacaagaccgcccagagcataaataccgttctggactgccggccatacgaaatacatcaggattcccacaaacatatatacaatggtggaaatgatgggcacaaatctggaaccgccgaagaaggaaagtgcgtttggaagcacgatcttatgaaaacggttatgcaaagccgcaacaccaaggccgacgatgataccgccaaacacacccatctgtaaggactgaatgccgcagacagaggttacagtaccttccagaacgctttttgcgatctgtccgtctgctgtgatcttaccatttactaccagcataccattgatggctacattcataacgaagtaagcgatcagtgcagaaagagctgctacctctttctctttttttgccataccgatggccacacctactgcaaagatcagcggtaggttatcaaataccgcgcttccgactttgttcataatgatcaggagtgcatgtaaaattgttccgtctcccagaatcttctgaagtccgtaggttgcaatggttgtttcatttgtgaaggaactgccgaatccaagaagcaggcctgccacaggaaggattgctatgggaagcataaaggaacgtcccactcgctgcaaaactccgaaaatcttgtctttcatgttttctctccttttctttcgacgttttggagcgggagtcttttaagtgggcaacaaaaaaagacaccaacccccataaacgtcaaataataacatttatgactggttaatgcctgcttatcagttacacaccaaatctgaaatacactatacgggttttgttcttctgtgtcaaggagtaatttgattttttcccaaaaagatatctcctcatatcactatccgctccgttgccagcaatccctcgcggaatattacctgtgaacagcagccatatagcttctattctcagaaagtatgcagaaacgaaacagaccggaaattcacttatcttgactttattcttacttatgataagatgaacatagaatgtccggcagcaatgttttttgcccagaccacactatacatttcataaaaacggaggtacttttccgatgaataccatcaagaaattcatccactactacggcccgtacaaagcggtcttttttattgacctgatctgtgcagccgttatcagtctggtagatcttgcttatccccagattcttcgtactatgacaaaaactctctttacacaggataaggatatgattcttcatgtcctccctgtgattgcagcttctctttttgttatgtacattgtgcagagtctctgcaaatattatgtaacctatcagggacatatgatgggtgcaaagatggaacgtgatatgcgccgggagctttttgaccattaccaggagctgtctttttcctattacagcaggaataattccggtcagatgatgagcaagctggtcagtgacctttttgacatttccgagtttgcacatcatggtcctgagaatctttttatctctctggtaaagatcgtcggtgcttttatcttcctgttctttatcaacaaaaaacttgcactgccgctgatcctcctggtgatcgtgatgtttgtgttttccttccgccagaatgcaaaaatgcaggaaaccttcatggaaaaccggcgtaagatcggagatgtaaatgccagtcttcaggatacgctttccggaatccgcgtggtgcaatccttcgcaaacgaggacatcgaacgtgccaaatttaagaaaagcaatgaagcgttccttgtttccaaaagagataattatcactgtatgggaagcttcatgagttccaatcttttcttccagggcatgatgtacctggtaactcttgtttacggcggctatctgatcgctcagggtgaaatgcagactgcagatcttgccatgtatgccctgtatatcggaatctttatcagccccatccagatcctggtggaacttgtggaaatgatgcagaagggtctttccggtttccgccgtttcctggatgtgatggaaacagaatccgagatcagggatgcagacaacgctgcggagcttacggacgtgaaaggacatgtgcgttacgaccatgtttcttttcattacaacgatgatgaaactcctgtgctttccgatatctctattgatatcccggcaggaaaatccattgccctggtgggaccttccggaagcggaaaaaccacgatctgctctctcctgcccagattttatgatgtgaccggcggttccattactgtagacggaaaggatatccgcgggctgactcttaagagccttcgaagccagatcggtatggtacagcaggatgtctatctttttgatggaaccatcaaggataatattgcctacggaaagcccggagcttccgctgaagagatcatcaaagccgccaaatgtgcgagtatccatgactttatcatggagcttccggataaatacgacacttatgtcggagaacgtggcacacgcctttccggcggacagaagcagcggatctccattgcacgtgtattccttaagaatcctccgatcctgatcctggatgaggccaccagcgctctggataacgaaagcgaacgttggatccagaagagtctggaggagctttcaaaaaatcgtactaccattacgatcgcgcaccggctttctacgatccgtgatgcggatgagatcattgtgatcacggaggagggtatcgccgaaagaggcactcatgctgaactgcttgagaagaatggattgtatgctgcatattacaatatgtagaaagatacgagggaggcgcttcgctgtcccactgagatttttatagggcaaaataaaaggctgctgtataccttatcaatagtgatatagatatatagcagtctttttatttgtcaattactatcttttcaaaaaattcaatcaaagattacagcagataaaccggaagctcgtctttaattcctactggctggttgttgtccggctcatctttctttggggtgaggaatttggcctggagttcgtcggcgtttcctccgctgatcacgttctgggctacagttcctgttgtttctgctgcagctgttttctttgctgcggttttacgtgctgttgtttttctggtagtggttttctttgctgttgtttttgttgcggctgttttctttgctgtagttttttctgccgctttttcagctgtttcagcttttacctctgacggcttctctgctgctttaacctcagcctcttttacctctgtttttgtttctgttttggatgctttttctgcatttactgctcttgcgatgcttgctttacctactgacacgattcattacctcctctgccaatgctatgtactcttttgcgctgcggctgctttttttgaactccacaactggttcactgctgtcctgggaccattcgatggagctgtctacacggataaaagattcgaaaagatagattccttccatttctttcagtgtttccatagtctgtttgaaataattctttctggcatctgccttggttactacgattcccaaaacctttaaatccggagcgatctccctgacttcattgaggaaatcaaacatatttgcaagaccaaacataccccacggacttgcctctaccggaacaagaacataatcggatgcacataaaatattcatcacccagccgccaagagtaggcggtgcatcaatgagaatgtaatcgtacactccggaatctttaaccttctgcagacatttccgcaggataaactctctctgccattttgtaaaaagctcatattccacggagctcatcagcgtagacgacggaaccagatccagattctcatacttcgtatgcacgataaaatcgctgagatccgactgatgaccgatagcatagtagagattcttttcccctgctgccatctcaagcacttcttcctccgaaaaaaaagaaagggaaagattcagctgcatatcaccgtctaccatcagtaccttcttacccatgccggccagtgccgctcccacattggaacagctggtggactttccgctgccgcccttattatttgcaaaacagatcgttactgtatttcccattacagcctcccgacaacataatttcgtattttctgtcacttgcccttattataatataacgttctcctaaaaacaagcacatcccccataaaaccacgaaaaccgacaaaataacctcacataaaacaacagtatatacacccaaaaacagcaggttccggatcactccgaaaacctgctgtcctgattcgctgactattattattttacgataaaagattttctcttgctgacaacatcgaagataaccgctgccagaagaaccatacctttaacaaccttctggatattctggtcaatacccatgatactcatgccaagattcagaacacccatcagaagtgcaccaatgataacaccaggaactgtaccggtaccaccataagcagaagcaccaccaataagtcaatcacagtccttctcctgtatgtttttccttactgctcgaatctgcccttcatcttcacttcctgctcccacacagcgaccttgccgcgggcaaacaggctgttgatgttgagattctcatccagtaccagaaggtctgcgtctgcgccttccgctacacagcccttgattccttctttgccaaggagtacggccggagtgctggtcagaagctgtaaggcatcctccagcggcatgccctctcttaccaggatctggatggtacggtgcagatacttcggggacgcgtaggtcaggccaatgcactcgccctcttcgttgaagcgcggctggcttccgaacgcgtcactggacatggttacatgatccaggctcacatcttcgcggtgcaacagctcatagagcttcagagcatcggattcgacctccacatcatcggcgccggcggtgcagtcaatgtagccgccacggcgcaccagatccgcgccggcatcaatcagtccaggattgcgtaagatgtgggtcggcagcaggttcttggctggaacgtcggaatgatccagcacatagaaaatcggatccagtcttccctctccgtcacccatgtgcatggttaccaggccaggggtattgctgagtaagccggctctgcgcgctgcagtagccagcgcgatcagctcttctccgcctgggttggagcttctgtggtccgataccgctaccttcacaccgatcatcggtggaaccaggatgatatcgcgctctacacttccggtcagggtggtcggcgggtaaccataggaactggtcagagtgtacacggtcatgccctcttcggtcagggcgcgagcttttgcgaccagattttccacactgcgggttacgccatcggttcccagaagtccgactaccgtggtaataccatttttgaagaattcactgagctgggattccggtacacgggatgccggcccctgctctccgccgccgcctgtgatatgcacgtgcatgtcaatgtaagccggaacaacggtctttccctccagatcataggtttccactcccggaagtccctcatatccctcaatagtatcctgcatcagaaggattttttccccctcaataaggatatctttctttcccagtttctccggtgcgtacacattcgcgtttttcagtaacttgatcataatgtcaattctcctgtctctttcttttccgcttttctatttcaaagcttctgtcagtctgtctcaaaggtgccttttaccagtgcttttccatactccaccattttctgtccacggacaaataccgtatctaccagaaattcctcatccaggatcacaagatccgcgtcgctgcccggacggatgcagccctttttcgggaataatccgttggctctggccgggttctccccgcagatgcggatggctttttccaccggaacccctgcctttacagcatcacgcacttcctcatgcagggaagaaagccgtgtaaccagaagctttgcgccgcccccgccaatcacatgaacatgctggtccacataaccaggaattaccatttttccatctgcagaaacaacttccaccggagcagaaagttccggtggatcgatgtgttctgccacagaaaatactttttcatctacgatcaggatatcacggattccttttggatccggatcatacagattcgcgtttttaatcaaaagcactctggacatcgtatttagttctcctttttcttctcatcatcgagcttggcaataccaaatccggtaaagccccagatgattgcaaaaatccagccggtgtagcacaggattgcccatggaaggtaatccaaagtctctacgccaagggtggaagccatgtaagcacctgctgcggaccacgggatcagcggtacaactacggtaccggcatcctcaagggttctggacaggttctttgccgcaagcccgcgctctttgtaagcgtcacggaacatctcgcccggaatcagaatggcaaggtaagagttaccggtggtcagtgccatggtaatgcaggctgcaacggttgcggtgatcagcgcaccggtactctttgccacgcttaagatcttctggagtaccacatccagacagccagcccggctcatgatacctgcgaagcagaatgcgcagaataccagaagtgtggtgctcataatgccgttcataccgccgcggtttaacagcttggttacggcctcggaacaggtctcggtgtcaaatcctgcacggtggatcatggatacatcaaaaccgtttacggttgcctttaacacatctcctaacgctacgtgctgaatgaagacactctccaagcctgctacaaaagtagaaagaagcataaccggaatggttggcttctgaagcagggagccgcccagcacgatcactaccggaatgatgatcagcaggttccagctgtacatggaagaaagctggcttaataaagtagtaacggtgtcagaagtaatatctgcgcttacatctgcgttcataccaacaatggcatataccaccagggaaacgatggttgctgggacagtggtgtagaacatatgtccgatatgctcatacagtgtgctgcctgccgcgatcggagccaggtttgtggtatcggacagcggagacatcttgtcaccaaagtaggaacctgcgatgcaggcgcctgcagtagccggaagggatacgccaagggcgcttgcgattcccatcagggcaacacccatggttgcaacggaaccccaggaggtaccggtaacaaccgaaaccactgcctcgatcaggaacgcggtaaccagcatgaatttcgggtttacgatctggacgccgtaataaatcatcatcggaatggtaccggatgccatccaggtaccaaccatagcgccaacacatacaagaatcaggatggcaggcatgccctttgcgatcttggtgcagatctcatccatcatctcatcccaggtaatgcctacacggaacgcgataaatgctgcgattgcagctaccatgatcagaagcggctctgtgctgtagccgaatacgccttttccgatggtaaggatcaggagcattgcgacgatcggtgtgatcgattccgcaaaagtgggcagacgtttggcccgttctttcttttctttcatttgtagtttctccttttagcctccttcgtgacagtttcacattttatcacggcagagtattaagatttggacttattatatcagaaaagataacgggcaacaactaaaactttatatttttttattttcttgttacacgggagtttgacacattgaaattcaaaaaagtaccgcaaagccttgaaacaggcttatttttttgtcaaatttttatttttattatatagtaatatttagtgatatgtactataacagtggaagcggtaattattgtgcgtataacaacatcaaaatcaaaaaattccgagtccttttatatcactcagtcctatacaaatccggttattaaaccgcgctttgaaaggaacttatactacagaacaattgctccatattttaaaagacataaaatttgcagatgtagaagaacagggtttcatgccggtatatgaacgtcagaaaatcactgacgatctccacgaaacctgtggattcagaacagactatcaattcataacaaaacggaaaatgaaaggaattcagaaaaaaagtaagcggagataaaacattactatgtttcgtgtatgcagataaaagtgccacaccccttgtatttgaagggcactgaaaaacttccatttcttcttaagtggaagtttttcttttatattattttcaaatctttacttaggaaaatcataaaaagctatggtttactccatagccagctcatctaatcttactattcgttttacatttgctgtaaatgccgtaaaatacatttgcagatgcatagcaaataaacctctcgaatctgctttacgcaaaccgtgagcttcctttagttctccattcttttcttctatcctgtgccgaatcttcattcgctcctgaaaatattcgctttcttcaaatttaagcctttcaagatttttctcgcttgcttgcgtgatactgtagcttcttgttttagcgtttgatcttcctacacggcatttttctctttggggacatttccgacacgttactttgctaaatatatatcttaaataagtattcccattttttgccgttcttttttctacacgcgtggaaagctctccggcaggacactgcagcatcccagcatctttattaaagcagaaaccttcctcaaggttcccgtttgctgcagcagctactgctgtattggttctggcaatcaatgtaatctcttttccgcagacttccagattgtcatcactgacatatgccatatcgcctataacttctgtaacttttattccattttccttcgcgttttctatcagttttggtaattcctgcccatctggtgctcctccatctgttacagtgatccccgcaatgagacgttcttcagtcatcgcaagatgattcttatatccatagaacgtactggttgccgttttatgtccaaaccgtgcatctttatcatctttggatcggatctctttgagccgctcatcttctagtagttctttcatttcatgagaaagtttctgtatctttttatttccacaggattttattccttcctccagaacctggagtagttccctagtataggcaatttcttcatccagtcctgcttccaaagagggtttctcaggaaatcgctctgataattcaaaagctgttttataaacctctttccgaagttgtttgctcatatcccgcagaatctgcgttggagattttgcccagacagaagcaattgtatgggtggaatcaacgataatggttcccgatttgatcagatttttatccaaagcctgttgaatggtttcttttaacatttcttccagaatatcttctgtaatacgagtttttctgaattttgtgagaagactgggatctatcatttttgcttctggttccaggtcaaggaaaaatttatatgccatgtccgtctgggcgctgctaatcagggcttcgtcagaaagatcgtacagttttttcaggaaaagcagtttaaacatcatttctggttcctttgccgggcgaccgaaattttcacaaaaaagcccaattcttttttagaatcagactttttcagtgcccttttaaatatggttttgatttggttttgtagcataaaaaaatctccttgtagttgtatttgcatcgtgcagatgcttctttaactacaagggccgctctcactacttctaaaaaccaatcagtagtgagagcggccgcacatttgagttgaagtgtcaacccctatttagggaaaaactaaaaaagaggttagacctcatgtataagatctaaccttgaaaattaactaaatgacattgaccagtgaacagtaacaaaataaccttacataaaacaacagtatatacacccaaaaacagcaggttccggatcactccgaaaacctgctgtcctgattcgctgactattattattttacgataaaagattttctcttgctgacaacatcgaagataaccgctgccagaagaaccatacctttaacaaccttctggatattctggtcaatacccatgatactcataccaaggttcagaacacccataaggagggcaccaatgataacaccgggaactgtaccggtaccaccataagcagaagcaccaccgatgaaacatgcaccgatcgcatccatctcgaagtttgtacctgcctgtgggttggatgagttcagtctggccattgtcaccatacctgcaatagctgccagaaggcccatgttcaggtaagcaaggaaataaaccttgtttgtgtcaataccggaaagctttgttgccttctcattaccgccaactgcataaaaataacgacctgttgtagtcttggaagcaatgtatgtatagattgcgatgatcactacaacccagagaagggaattcgggatacctttgtactgagcaagtctgaacatgaatgcaagaacaactgcacagatcagaaccatcttcactgcaacaccaccgaaagactcaacactgtagcctttttttgcacggtctgcacggtttttcataacaagtgcaacatagaggatgcagacaataatgccaactacaaaacatgttctgttaaatccttcacctccaccaaggaagtccggaatatagttattgaacagagccagataagcatccggcatcggggccagggtctgtccttccagaactacgttggaaaggccacgaaaagcaagcatacctgccagagtaacaataaatggaggaattcgtacataagcgatccagaatccctgccatgcaccaatggcaatacccacaagaagcatcacgatcatagtgagatacgggttcatactgttgagaaccatcatcttaccaccgacagcagcaacaaagcatacaacagaaccaactgacagatcgatgttaccacctgttaaaatacagaacagcataccggttgcaagaataaatacatatgcattctgggctaccaggttatttacattctgcggaagaagcataacgccctttgtgttcacagaaaacatgatcacaacaaataccagaacaatgaccatggtatatttttttaatatttctgaaaaactaatctttttctccatcttcttactctcctttacctgacttcacgatcctggacatgatcagctcagatgtagcttcctcaccacttacctcacctacgaatctgccctcgttcatgatatagattctgtctgacattccaagcacttccggaagctcagaagagatcatgatcacagattttcctgctgcgaccaggtcattgatgatacagtagatttcatatttggcacctacgtcaatacctcttgtaggttcatccaagatcagaatatccggctctgcaaacatccattttgcaagaaggaccttctgctgattaccaccgctcaggtttccgacattctgctcaactgtcggacacttggttttcagtttcttcctgtattcctcagcaactgcgtattctttatccgtatcgatcacttttccattactgataccggacatgtttgcaagcgtagtgttcatctttatggacttggaaaggatcaatccgtttccttttcgatcctctgtaacataggcgagcttgttgtcaatagcctcctgaactgtattcagcttcacttcttttccattcatgaacacctggccggaaatcttagttccatagctcttgccaaaaatactcatggccaattctgtacgtcctgctcccatcagtcctgaaataccgacaacctctcctttatgtactttaaaggatacgttatttaccaccttacgttctgtatacagaggatggtaaacattccagttcttaacttccatggaaacatcgccgatctttacatttggacgtttcgggaaccggtctgtcatctcacgtccaaccattccctgaatgatcctctgctcagaaaaatcgtctttctttttatccagtgtttcaatggtagatccatctcggataactgtgatcttatctgccacataggaaatctcatttaatttatgggaaatgatgatagaggtcattccctgcttcttgaatttcagaagaagatccagaagagctttggagtcatcttcgttcagtgatgcggtaggctcatccagaatgagcagctttgcattctttgcaagtgcctttgcgatctcaaccagctgctgtttacctacaccgatatccttgatcaaagttctggaggattcctccagtcccactattttcaaatatttatctgcttccccataagtttcattccagttaatggaaaagctcctgcctctttcattgcccaggtacatgttttcaccgatagtcatatacgggatcagtgccagttcctggtgaatgatcacaattcctttatgttcactgtctttgatggtgttaaatttacagatctcaccatcgtaaataatatttccttcatacgagccgtacggatatataccacttaatacattcattaatgtagatttaccggcaccgttctcacctaccagtgcgtggatctcgccttcctcgacctggagattaacattatccagtgcctttacacctgggaaagttttggtgatatttttcatttccagaagtatcttagccaactcaatttccctccctttccactgttcatgcaggcggttatattccccgcctgcatgtgataaatttctttcttaaaaattatgattatttgatctgatcctctgtgtagtatccggaatcgatcaggatttctttgtagttatctgttgtaacaacaaccggatcgcaaaggtatgtcgggatgacacctgttccgttatcataggattttgtatcgttcacttccggctcctcacctttcatgatggagtcaaccatttttactactgcagatgcaagagctcttgtatctttaaatacggacattgcctgttttcctgctacaaggttcttaacgttcggtgtatcacagtcctgaccggtgatgatcggatattctcctgtgtaggaagctgccagtgcattctcaacaccaagtgccgtggaatcgttggagcagagaactgcgtcaaggtttgttccgtcagagtagttacctgcgatgatggtatccattctgtcctgtgcttttgcactatcccagtttgcggtagcaacctgctcgaactctgtctgtccggattttactaccagcttaccgtcatcgatgtatttctggagaacatccattgcaccaccgaagaagaagttacagttgttatcaccaggatctcctgtgaacagctcgatgttaaacggtccatcctgattatcaagatccagtgcgtctaccaggtactcgccctgtttctgtcctactttgtagttatcaaatgttgcataataggaaactgcatcagaattcataagaagacggtcataggagataaccggaattcctttttctttggcctgtttcagaggctcgccaaggctgcttccgtcgatggatgccacaaccagaaggtcgcatccgtttgctacctggttctcaagctgggaaacctgtgtgcttacgtcgttggatgcatactgaaggtctacttcatatcctgctgcctccagctctttcttcatgttctcgccatcctggttccatctctggagatccttggtcggcatggtaacaccgatcagtttcttgtctgctgcctgtgctgttgctgccggaactaccaccataccagctaccattgttgcgcaaagaagtgcagataccatttttcttttcattgtaaaatcctccgtttcattatttgtttttggaatcacgtttccttcgatgatgttactatagcacaggactgtctggacatagttggcaatgacagagacatttttttgcaaaagaaaaatgccctgcatcaggcaagacatttttgcaccaaaaatctgctattgatttttgtcataattgtgcattattgcacatatggctacactgccacattacttgcagaatttcaccaccacatatatgccggtatgcaatctgttctgcattactctgtatcataatctgtattgagatatacttcatcccttctgtggaaaccgccgtcaatgatcacctcatcaatattatcccttgtaacggcaaccggttccagcaccttcgccgggatatcatagcttccatcgttcatggtatctgtcacatctgacggaagctttccctcttctgccatcttcaccgcatattcagctgcctggcatgccagatcttcgatagatttaaatgctgtcatgtactgggttccttctacaatacgctgacatgcagccagatcaccatcctggcctaccacgatcacctgtccggcaagctggttttccgcaagaacctgtatcacctgactggcaatatcatcatttccacacatgattccctttacatcggggtactcttccagtgcctcctccacataatctgctgccagctccgcgacccagccctcacagttggcttcgtaaaccaccttcagatcactgtttttcagagtgtcttcaaatccctcttttaccatgtccacattgttatctgaagcagatccctggaccataaaaatctttccgccattagggatcgcttccatcatggactgtgccatgacctctccgactttccggttatcaaaggaaatatacatgtctgtatccgcatcatttaccatgcggtcataggagatcaccctgatccctgcattgtgggcacgctccacagcctcagataatgccttgcagtctctggcaatgatcacgatcacgtccatatgcttcctgataaaatagtcgatctggctgatctgctcttttgtatctgctcccgcatcctgaacattcacttccgctcccaattcccttgcggttgccacgaatgcatccctgtcacgaatccacctctcaataacaaaggaatccactgtaagaccgatctgaattttcttttcaccactgtcttcctctgtatcgttttcctgtgcagctgtctgctttgttttttcggaagcacagccattcagcatcaatgtcaacagacacagcaagatcaacagcttcctaatcattttccccccgctcatattgtctacctcaacctctctctgaattcacttggtgtcacgccttcgtattttttgaatatcctgctgaaataattggggtcgctgtatccggattccgcacagatctccttgatggaaagccctgaatctttgagaagttctcttgcattccgaagccgcacttctgtaagatactcgataaaatttcctccggtctcctgcttaaaaagcttgctgaaataataagggctgatatccacctcccgtgacacctcatccagtgaaatatcttttttgtaattgtcccgaatataggactttgctttttcgataatagaaaccgcttctttttcccttgcactttccatgttactgcagatttctgatgttttgcccaggaaccattttttcattccttctatatctgtatattcctggatctcatgaatataatttctgcggcagctgatcgcatatttcacggtacctgcaaaaaaggcctttttttccactcccatcacaagctccaggatcttgatgcgcatgtcctccagatctactcccggctgcttctccatccacctgataaattcctcggcacagcttaaagctcctgccacatccttatccatcacccgcttttcatagcgacgttccagatctcttggatattcgccgtcatatttctgtgcagccggaacatcctcaatatgtataacatggctggtgctttcccgaagtgcgatcatggcctccttgaaggattctttcatggtgcttcccatctccttcacccggccgataccacagcgaaatttactgtcgatcctgctttccagcttatgtaccatgtttctggttcttgttacaacctccacacgttcctcataggactccctggaattacggtatggaacaagcagtacaatacggtttcccataatgggtcctaccagacattcaaaaaatccctgagcgatttcccggaatgtggaataaaatttgtttgccttcacactggcccccaccgcattggtaagaacgccattttccgtggaatccccgaattcagccacgatcatatatccatattcttcccggatatccagaagctccctgtaattatcctgatatgtctgaaaatcatcctgcagaagaatattattgatatatccgctttcgatcatgggcacaactgtctccagcttttcacggatacggagatcatcgcttcgcttctgtcttgtgtaatctaccttttccatagctttggagcatgtttccagaatcacctttttgtttaccggcttggtaagaaattccataactccaagatttaccgcttccttggcataattaaatttatcataggctgtaatgatcacaaagaccacagatctgttaaatttctgaatttcccggattgcctggatcccacttaagcccggcatctgaatgtccataaagcagatatccggcggatatttctccgcctcctccacaaccacacggcctgtcttggctgtatggatttcacattcatttccatagttggaacttataatatttttcagggattccagcatgatcccctcatcatcagcaatcaggattctgtacatttttttcgctcctctccagaggaatattgatcactacctctgttcccattccttcaccttcactgtatatttccattaatccgtcccgctcataatatagttccagacggctgatcacattattcattccgattcccgtggaatcaccctcgcctgaactgctgtggactttttttgacagtactctttgtatctgttctccggtcatgcccagtccgttatcccgaacactgatctcaatatggtcgttccatttctccacactgagatcaatatgtccttcccaatctatattccggattccatgattgactgcgttttccacaaccggctgcaggatcatactgggaacacgtacattttccacatcacattccactttttttgaaaaatggatgtccccggcaaaccgtacattcagaatataaatgtaattgtccacagcctccagttcttcctccagtgtggcatcttcctcacccttctttacattgtagcgaaaaaaatctgccatcttttccacaaagatactggttttttctgcatcctccatcattgcaagctgtactcctgcattcagggaattaaaaaggaaatgcggattgatctgagactggagatacttaagctgtgcctccttgagatgtgtttccatcaaaagctccctctctatcatctgctgttctttttccatgctggcctttgtcctggcaatgtaaagaccaagattatccaccatggtattaaaggctcttgttaccgttccaagctcatccctggaatctgctgggggcatctttacattaaaattcccctgacctaccagctgtgcagtttctgccatattagtcagcggcaggaacatctcccttgttgccatgatcagaaggaacatcccacagatcaccaccagaagcatgatcatcatattactgatctccagatatctcataaccgcccggagagctgcataagtctgggaattttctttaaaaagctgcttgttcagctcatccatagaactctggatataactgtaaagctccagactttcatcatattcctgcttatatttctccacattcctgcctctcttggcagctacagttcctgcggtacaggaaagatatgattccgacatcttacgtatcttcttctccagaagttttacggaatcatcaatattccgttcatttaacttctccagctcctgcctgtatttcgcctcattctgataataatccatcagtgcctgagagttttttaccttcagatactggtacatactgtcctgcacatcgtcaaaaacctgcccaagctctgtgatctgggcattgctggcatacacatcatccatctcctgcatggaattgttgatccgcgcataaaacagcgtgttgatgctgaacagtaaaactgccagcacgccaacctcgatcatgatcttgcttacaagagaaaagtcactccaacggatctttttcatctgtgactgcctccctcctcatcttcttcactgctgttctgtcaagaaaattaatgtctacgttgtagaaagaattggttcttccatcttctatatagctggtaactgcctccacactgtactgtcccagctgggtcgtgtccacatcacaggtaactgaaataacacctttttcaactgccgccagaatatcctcagatgtataataaccaatgatcttcacttttcctgcaaggttgaaatccagaattgcctgtcttgcacactccgttgtctcctcatccatacacacaaggatatccggaacattccgcttctgctgaaaaatatcagtaactgcctcctctgtttcaaaggttcctgttgacagaagattccttcccttgatctcaatatcctcagaaccagctgccatcttcaccgcattgctgatctgagtgtatatctgactttcgttcatatcatcaatgtcccgtttctgcaggatcaggatcttcttcgtgttctcatccacgtatttggcaacaatttccccgtaagccatgccaagctgataatcgctgactcccacaaagctctggcggcggctgtgcaccgcatcactcatgactgtaaccaccggtattccgtttcttactgcagtattgatcgcttcttccagaccggcttctccattatactgcaggataataccatccgccttggccgcaatgctcatattcatataatcaagtttatcataggatgtttctctgtccggccccatgatctcaagcagtacattattctgagctgcttttttcttcgcactgtcatatactgcctgccagaactgggaatcggggctgtccacgatcatgtcgtactggtatttatatattttctcttcctgtttatccaaccctgctttttcactgattcctctgtaataggattctcctgtcacataagtaagcactatcacggcagcaaagatcagcaggatgcaaactgattttttcttcatagtacgctccgttctgttccacaaaatattccaggctcagtttatcataatctcacagaaaagtcactgtttaacatggattttctgtgcactttcatgttatattaataactataaccttgccaaaggaggccgcaagacatgacaaacgcaaccaagcttgccctggaagaatccctgaaacatctgcttcttaagaagcctttagataagatcaccatcaacgacctgactacggactgcgggatcagccgcatgactttttactatcatttcaaagatatctatgatcttgtggagtggtgctgtctggaagatgccagaattgcccttcagggcaaaaaaacctcttccacatggcatgaagggcttctgcagatctttgatgccgtgatggaaaacaagccgtttatcttaaatgtataccgctgcgtggggcgggaacagatcgagaattatctgttccagcttacctgcgatcttcttatgggcgtggtaacagaaaaatcaaaagatatccccatcacggatgaacagaaaatttttatcgcagatctgtataaatacagctttgtagggatcatgctggactggatcaaaaacggcatgcgcgaagattatcgcgaaatcgcagatgataccgcaaccgcactgtacggaagcatcgacaacgccatccgcaattttgccgccagaaacaaaacagcagaaatgcatacagaataaaaacttatcaaaacagacataatgataaaaaactgaacactttcggtattttgtaaatagaatcttttttccggatgggctatcataacctcaacagcaacaaagaacagttaatccgatacaaacaggtatctcatttacgaaaggtggatgtcatatgtcagataaaaaaggattcatgggacttgcagcacttgcggcagccggagccggcgcagccatgctgatgaaaaaaacaagagagatcaacgaagaggaaaacctccatgtgaaagaaactactgcaaactaccgcaacaccgagcgtggaaaacatgacaaaaacagcaaagggatttattattccaacggtaactacgaagcctttgcccgtccggaaaaaccggaaggtgtggacgacaagcatgcctacattgtaggaagcggtcttgcttccctggctgctgcatgcttcctggtaagagacgcacagatgccaggtgatcatatccacatcctggaagccatggatattgccggcggtgcctgcgatggaatctttgatccgtccagaggctatatcatgcgtggcggtcgtgagatggaaaaccatttcgagtgcctgtgggatcttttccgcagtattccttctcttgaaaaaccgggtgcttctgttctggacgaattctactggctgaacaagcacgacccgaactattctctctgccgtgcaaccgtcaaccgtggacaggatgcccataccgacggaaaatttaacctgagccagaaaggctgcatggagatcatgaagctgtttatgacaaaggatgaggatctttacgataaaaccatcgaagatgtatttgatgatgaagtgtttgattccaccttctggctgtactggaggaccatgttcgcatttgaaaactggcacagtgctctggagatgaagctttacttccagcgttttatccaccacattgcaggtcttccggatttcagcgccctgaaattcaccaagtacaaccagtacgaatccctgattcttcccatgaaaaaatatctggaggatgcaggtgttgacttccagtttaatactgaggtcacaaacgtgatctttaattttaaagatggcaaaaagatcgccactgctatcgaatgcaaggtaaaaggtgtagagcagggtatccttcttacagagaatgattatgttttcgtcactaacggaagctgtacagagggtacgatctacggcgaccagaaccacgcgccaaacggcgatgcggaggtccgtaccagtggcgtttggtccctgtggaaaaatatcgcagctcaggatccgtcattcggacatccggagaaattctgctcagacattgccaagacaaactgggaatctgctactgtcaccactctggatgaccgtatcatcccttatatcaccaacatctgccagcgtgacccacgtaccggcaaggttgttaccggtggtatcgtaagctgccaggattccaaatggctcttaagctggaccatcaaccgtcagggacagttcagggaacaggatccgaagaaggtctgtgtatgggtttacggattattcacagatgttcccggtgattatatcaagaagccgatgaaggattgtaccggtaaggaaattaccgccgagtggctgtaccacctgggtgttccggtagatcagatcgacgatatggcagaaaacagcgctgtctgcgttccgaccatgatgccgtacatcaccgccttcttcatgccgcgtaccaaaggtgaccgcccggatgttatcccggatggctgtgtaaactttgcattcctgggccagttcgcggaaactcctcgtgataccgtattcacaacagaatattccgtacgtactgcaatggaggctgtatacggacttttcggtgtagaccgtggggttccggaagtatggggaagcgtttacgatatccgtgagcttctggacagcagtgtgaagctgatggacggaaaatccccgctggagatccagctgccagggccgctgaatgcactgaagaaaccacttcttaatgttgtgaagggtactgtggttgagaaagtactgcgggatcatgatgtgctgaaagattatatgtaagatatacagcctgccaggcagatattctcaatccgaaaattaagatttgaacacagtaacgggcctccggttctattcgtgcagcaatcccccggaaatacttctcgcgcggtatttccgggggattattttattttctgatacttattttcccagtgtttcattcatacttccggaacggaagccctgaagatccagagtcacgtaagaaaatcccaatgtgcggaatttctctgtgatctttgttcttgtttcattatctgcaattttcaggatctcttcttccggaacctcgatccttgccatggtaccgtggatgcgaacacggaactgatggaatcccagatccatcagaaactgctcggcctgatctaccatgtgaagcttctcctcggtaatggtctcaccgtatacaaatctggaagcaagacaggcaaaagatggcttgttccaggtcggaagattcatgtcttttgacagctcccggatctcttctttatagaggcctgcttcctggagcggactgcggaccccaagctcctggatagccctttttcccggacggtagtcgcccagatcatccatgttggaaccttccacgatcatgttcatatggcgcgcctttgcagcttcccaaagtctggtaaagatggcttttttgcagatatagcagcggtccggcggattctgacggaaccccgggatgtcgaattcgttgatcttgcatatctcctggcaaatgtgattttcctggcagaaatcttgcgtttctttcagttctctgtcggtgaaggagcatggacatgcggtaatggccatagctttgtcgccaagtgtttcctgtgcagctttcagcaaaaatgtggagtccactccaccggaaaaagctacggctacacttcccagggaacggaggatttcctggagttttctgtattttttttcaagtgtgatgttatctgttgctggcatatgttctgtcacctcgtaatttgtaaaatcttatttttgccggatacgaatctgtaattttcagatctgttcttattgacatgctcttgcaatgctatgtgtgtattatttattgtaaacgatacctttttgccatacaagtatttttctacctgacagatgtactatgaaatttattagtatcctctctgtttccaaacataataagaccggaaatacagcatatgccatacttccagtctttctttttacagttattacatttcgatcacatcaagatcatccggaacaaacagatttccgtgataatactctctgccttctgctccgtaaagctctttacgtttcttaatgttcttatcctctgtgtgatacaggacaagattcttaactccaaggttctccgccagctcactggcatccttaactgtggagtgatgcttttcatatggattgaagatatcacgctgtccatacagacagaatgcttcgtggaacatccagtcgctgccttttgcgtatttctcttcacattcattgtatggctcgtctccgcagcaggtaagcaccttaccaccgtcatagatcatctggaaaccgaactgtttcgccttggtggaaccgatatcaaagaaggtcactttcttattaagaattgttttttcctcgccgtcttttacctcgatcagatgaagtctgtcaccgatgtactgtgtctccttcttattcagaagcttaaatgccatgtctttcagaagtccgatcacttcatcatgagcatagatgtttgcctcgccctgataagtgccttttttcatgttctggcaaatgatgcggatcacccacacgatccccatgatatggtctacgtgcttatgtgtaacaaagatctcatgaacatccatcagatcaacgccagccttcttcagctgagaaagcactgtatttccgccgcctccgtcaaccagaaaatggccgtactcatcgctgagcacaaaacaggtattgtaacactcagttaccagagcatttccggttccaagcatggttaatttcattgttttttctcctcctgtatatgtacggtttctcttattttttctgtatttttcgtgtctcatgatatcattacggagaattattttcaataaaatttatttttttctcacgtatattgctttcacataagaattcatcccaaaaacatattcaccatcatcatatacggtaaacgggcaaacttttacataatatctttttccttttgccggtttggtaagggttttggttcttgtgggagaatatattgtttttacgcctttgcggaagcggtaatccgtagaatactgaattctatatccaatcgcattggatgctgctttgcagacaaccgttgcctgtccggcttttttacttttaagcgatgtaatacttccacgtgaaagagtgatcaacggttctgcctggattttgaaatagtattcccggtcactataaacattatcccaggcatatacctccagataatacgtacctgcatttaaagttttggataccctcgcactaccttttccagtcgcattattctgcttgaatgttacattaccaggcaccataactgctttacctgaagaattatatattgaaaacaatacttccccatctaatgtcgtcgcttttaatgagacatgcgatttctgtttaagtacaaatttgtaatatgcatttgaatgatgttttcccttacaggtttctcccagtctgtagtctatagattcactgttcatagaggcctgtaccgaaactacaccaaatcctataatgcacatagccatgatcagtaatgccgcactgatctttgtcaaatactttttcatatctgcttcctcctttttttgaccatttctgacatttttagtcatctataaaatgattatattaccacgctgatgcaagtgtcaatatacggttatttattatataataaccagcttatacccgaatttttttattccttttatatttttgtgttacaatatagccgaagcaaatgcagatttttttctgcatttgcttcggctatacataataaacggaggaattcaaaatgaaaatcacaatcttaaacggcagtccacgccacaacggtaacacacagatcatggcagatactttttcagaaactgccagagaaaacggtcacaccgtaaatatccttaatatcgcaaatatgaacatccgcggatgtctcggatgcaaatactgctactcccacggcggaaagtgcgtccaggatgacgatatggaaaacgttctcgcagagctttccgacaccgatatggttgtttttgcatcaccggtctactggttcgatatgaccgcacagcttaagaccgttattgaccgtctgtacgcctgcggaagcacaggattccattttaacaaaactgcacttcttcttgacgcaggcgctgatcatgtttttgacgcggccattgcacagtacaagggaatgaccgcttatctcaagtgggaggataaaggaatcatcaccgtcccgaatatgctggataaaggcagcatgaaagcctgtccaaagcttgaagatatcaggaagctggcagccagcctgtaagcctaccagacctccgactctacagctgcacgctcaatgccaatgcctttcatataccggtccataaaagcattgaagcccttcacgccctcttcttccggtgcgagtgtgctgccttcatttcccttgaacacgttttcatccaggaaatctgcaagatcctcgccatcttttttattaacaagataggaagccagaagtgcgattccccaggctccgccttctcctgctgtagacattacggataccggtgcatctaccgcatctgcaaggatctgctggccgacaccctttgtcttaaagagaccgccgtggcccagaagcttatcgatctttacatgctcctgattcagaaggatatccagacctacacgcatggcgccgaggcaggtgtaaagattatttcgcataaagtttgccagtgtaaatttgctctcaggagaacgtacaaacagtggacgtccctcttcaaagccggtcatatgctcgccggagaaatagcagtaggaaagaagtccgccacagtccgggtcgccttccatggctttgttataaagagttccgaacagtttgttcatatctacttccatgcccatagcttctgcaaattccttaaacacatttacccatgcgttcagatccgaagtacagttgttggaatgtgccatggcaaccggatctcctgccggagtggtaaccatgtcgatttctttatacggtttggaaagtgccttctccaagacgatcatggcaaatacagatgttcccgcagaaacatttccggtacgccgacggacactgtttgtggcaaccataccggttcctgcgtctccctcaggcggacacatcgggattccagctttcagctttccacttacatccagaagctttgcgccttcctcagtaagaactcctgcatcctgacctgccaccagagctttcggcataatatcgcgaagcttccatgggaaaccataaggcgcaaccagttcatcgaacttctgaaccatctcctcgttatagtccttcgtttcactgtcgattgggaacatacctgccgcatcaccgataccaagaactctttttccggtgagtttccagtgcacataggcttccagagtggtgatataatcgatatcttttacatgctcctcaccgttaaggatcgcctgatacaggtgtgcgatgctccatctctgagggatattgtaatggaaaagctctgccagcttctcagaggcttctcctgtgatgttgtttctccaggtacggaacgggaccatcagctctccctctttattaaacggcatatagccatgcatcatggcactgacaccaaacgcacctacgcttgtaagctccactccatattttttctgaacatcttctgccatatcctggtaactgccctggagacccttccagatctcctccaggctgtatgtccagataccatctacatactggttctcccattcataggctccggatgcgatgggctggttcttatcgtccaccagaactgccttgatccttgtggaaccaaactcaataccaagagccgtacgattctcaagaattgctgtttttgcctcatttactcccattgtaaaaaacctcccgtattatttgctgaaatacatgctgttccatctcagctcattctgcagattccggatcgttgtatcgccatcaatataaaccgcttcaatacccatagctgctgttttccagtcaccctcgccaccgaagccatagccttttccatcagtcgctggatcgcaagtctcggaagctgtttcagggagcccagatcaccaaagtgtgttacgatagcctgataatttttctcctcgaggaagcgctcaaaaccgatctcgatccctgcctggactgctacatgcttcttaaattcctcagggtcacgtccatccagaatcatatcgtatttattataatattcttctaccagaacatcaatatctccctggcttacatcctgaacatattctgcgatctcattaaccggataagcatcgatctcccagtttttcctggggatgggtgatagtggtaatgccctgtccctgtcttgcatatagtgaattatcatagccggttaccgcaacatctttcgggatctttttgccctgacgttccagttcttccatgacctggacagcgatctgttgtttttattatttatcaaaagttccatataaagaaaggccggaacaccctccccattctggtgttccggcctttctatgccgccttgcatatttatttcaaagtttttgctgccttccgatcatttcctgccttagcggtacatcttcatataatccccgtgtgcctcgatcagctcatcacacattgcctggatgtctttgatgttcagctctgcacctgtgtgcgggtccatcatggctgcctgatagattttctggcggtctttggtcactgctgcctcaatagcaaggagctgcgggctgacattggatgaattcatagctgccagctgtgtaggaagcttgcccacttttaccggatgtacaccggttccgtcgatatagcatggaacctctacgcaggcatccgacggaaggttatcgatgtagccgttgttaagaacatttccaccgatcttgtacggtgtgtttgtaacaacagcctccatgatataagaagcatactctttacttctctcatggccgatcttgccatccttgaggatatcctcgcgctctttttcccagccctcgatctgtttgatacatcttctcggatattcgtcaagcggaatattgaactcctcgatcatctccggatatttggatttaatgaagaacggattatactctgcattgtgctcactggactctgtacaatagtatccaagatgacggatatactcataacgcaccatgtcttcatgcttctcaccggaggtattcttctcctcggcaattctgcggatctccggatacagatcatttccgtctttgtcgtggatctcaaggagccatgccatgtggttgatacctgcgatcagctctgtacgtccctcaatcttgtcttccattcccattccctcaagaagcttctgggagcagacctgaacgctgtgacagagacctacggtacggatctttgtaaaacgctgcatatagccggtaagcattgccatagggttggagtagttcaggaacagagtgttcgggcagacttcttccatatcccgggcaaactcttccaggaccggaatggtacgaagtgcacgcatgattccgccgattcccagggtatctgcgatagtctgtttaatgccgtatttcttcggaatctcaaagtctgtaactgtgcatggctcatatccgcctacctgaatggcgttgactacgaaatctgcatctcgaagtgcatctttacggttctctgcaccaagataggtcttgatcactgcacgatcctcgtttacgttgtggttgatggcacttaagataattctggaatcctccagcctcttctcatcgatatcataaagtgcgatctcgctctcgcgaagtgccggtgtacacatacagtcaccaagtacatttcttgcgaaaaccgtgcttcctgctcccataaatgtaattttgatcatgttcgttcctcctgcctgtctttttggatatttctgtgaaaaatacctctgttttttataaaagtactgattttctgctgtttttgcggtgcagctccgctttgtttttattatgtctttatgatactgccgaaagtatctttaaaatatatactttgatgtcaataattgttgttttgttgcatgaaatataaatgcccgtttactgatacagttcagaaatttcctataaaacatatttcctataaaatttacttccattcgtttttatgcttttttatgttttcggaacattgcaaagtaattttccataatgcaaaaactctccatccgataccaggatcatatatatcctgattcggacagagagctgttattttttattgcaaaggtctgccagcaacaaaaggtactgccagttatcagtcctcagattccgtataatccccttttttccccttcactacaagttttctcttttcttccttgtattctctcggacttcttcctgttcttgccttgaataccttggaaaaagccagcggatctccataccctacttttgcagctacttcactgacctgaatatctccgtttttcagaagagtctttgccttctcgatgcgaagattcataagatattcctgcggcgagcatccgaggctttttttaaacgagctggtaagatagctccggttgacaccaatgcggtctgccagctcattgatcttcagacgcttgtcaaagttggctgcaatgtaatccactgcctgctccacataaacggaattgggatatctgtgggatggaagaagcttgccttctctcagacatgcatcccggttatctgtgatcaggtcagaaaaaagaagcagcagaagtccgttccgtttcagctcattttcaaaaacgagcttgttggtctggaccattgcatcaatatattttgcagcattttccatacagtggatccttcggaccggattttcccggctgaagccgcttacatggatcacttcctccgcagtcattccctcaaatcctacccagcgatatgtccagggattgtccatgtctgcctcataccaggcctccacactggatgggatcagaaatgcttctccacctgtcagatgatactgatggccatccatctcaaaaactccgcttccggattccacgatatgaagtacatgagagatcctgttatttggtccaaatcgatgtcccggatcgcatttttcccatccacaataagtaagacagagatccaccgcacctttctttaaattctccagacatttaaagctgtccgagcttgtaaaaccaactgtatgaagcaacttgtcacctccctgatgtcatatattatgtttctgcctgtgagctgcttcgccacccaataacaggccgccatatgcggcggcctgttatttttctggtcaggcgaatgttttttctgcagataatttttattccatcatttacagaaatcagtcctctgcttcaattgtatacaatacagaatggaaatcaccgtttgtcttattgcagtagtcacgatcaaccgggattcctgcatacatcagctcatttccgtaagctttcaggcacttatcttcccattttactttgtaaagctgatcctcgtcaagacccttgaagcgcaaacgcatccaggaagcattgaccttgttcagtctttcatagtatccggcaactgcctgttttttgtctctggaaacaaccatccatgcagtatcatttccttcgaacgggcttaagatacggtagaaatcaccctccacctggatcaggtcacgatgttccttcatgaattccacctgtgcctttacctcttcgatctctttggcacttaaaaggttcagatccagctcatagccaaaggttccgaaatatgccacatttgctcttgtggaaagcggtgtggtacggtgcagctgatgattcggtactgctgatacatgagatcccatgctgacgatcggataaacaaaggaggtaccgtactggattttttctctctctgctgcatcggtatcatcactggtccatgtctgcggtgcaaagtacagcattcctggatcaaatcttgctccgccgcttgcgcaggattcaaagagaatgtcagggaatctctctgtcagtcttgtatacagctcatatacaccaaggatatatttatgcatagtcttgccctgatctgctgcagatgcgccgcggctaaaaggctcggacatgtagcggttcatatcccatttaatgtaggaaatggaagattcctcgataaccttggagatggaatcataaataaaatctacaacctcaggtctggaaaaatcaagaacgtgctgatgtcttgagtgggactcaaaacggtccggtgctccgatgagccagtccggatgtgctctgtagcagtcgctgttcttgtttaccatctcaagctctacccagaggccaaatttcaggcccatctcctcgatcttgcgggaaagtccggaaattccgtttggaagcttattcttatttacgaaccagtcgccaaggccctggtaatcatcgtttctggttccgaaccatccgtcatccagaacgaaaagctctaccccaacctctttggctttttttgcaatattaaggattttttcctcatcaaaatcaaaataggttgcctcccagttattaagaaggatcgggcgtgcatgatttctccattttccgcgcatcaggcggtcacggtacagtctgtggtaagcctggctcattccgtttaagcccttatcgctgtataccataacgacctccggagtctggaattcctcatctctggaaagctcccaggaaaagccctgaggattgattcccatcataactcgtgtcatctcgtaggtggaaacctcaacctgtgcaaggaagttgccgctgtacacaaagctgaagccgaaaacctcgcctgtatcttctgttgtatgaggacgcttcagcgcgataaacggattctgctcagagctggagccggttcctgcaagactctgtacagcctgtatacccatctcaagtttgcgtgtttttacatagcgctcacgtgcccatgcaccggaaagatggatcatctcataatccatatccgggaactccactgctgcactcatcacgttctcaagacggatcttctgattccctttctgaacaaggcgtgcacttctggtgaccaccgggtaatcctcatatacggaatatgtaagaacaaggtctgtgtccatcacagaatcatgaagtgtaatgtccagagatgttgcctcttcctcgttctctgtgtaggttgccggaagaccggcaagcttcttcttgccgccgtaaatctcatgagaaatatatttgaaatctacgatctcgcttccgttctcctgacgaacagtaagggcaggatttctgtaatcaccggttccgtaaacaggatactcctgtttggtatactgcatggaaagaagtcccggttccggaacgcatacagccatcagggaacgcatgatctcctcgtgaagataactgaaatcctctttatcgcggatagcttttccatagtacagattctccatctggccattttccatgatacaggtgatgtagcttaaatgtttgttataaatgtggaatgtctttgatccctcgtgaaatttgatcggcataattttctccttttttcgtttactgcggataaaaatatccgcctctttccttaagaatcatcaaataactgtgcattttggcatttgcttcgataaaaataccgctgacaacctcaataaccaaatcctcagttatatacattgtcagcggtcttgtattaccttatgtaatatttctgattacagttttccaccgctggtagcaataccttcgataaactgtttctggaagatcatgtagatcacgatcatcggaatgcaggcgatcagagatgcagccatcagttccgggaatttggatacgtactggccctgcatctttgcaagtgcggaagaaagtaccagcatatccttatctgtattaacgatcatcggccacatcagatctttgaatgcgaatacagctgtgaaaattccaagtgcgaccatactggatcttgtaagtggtgccatgatgtaaaggaaggtctgaccgatgttacatccgtcaagtctggcagcctcctccagatccttcggcagtcccatatatccctgtctcagaaggaaagtaccgaatgcagtaacaatacctgggaatacaagggcaaagatcgtattcagcatacccatcttgctgaccatcaggtactgcgggatgatgaagatctgtaccggaaccatcatctggaacagtacaagactgaagcagagatcacggcccttgaagttcagtcgtccaaatgcatagcctgccatagttgctgtaagaaccgcacacactactcggaagaagatcagaagcagtgtattcttgtacagaagcaggaagttcatgttattgataacagaaataaacgcgtcttttctccatattttcgggaaaatggtaaaaggatctacagatgttgcttccgttacagttttaaaagctgtcaggatcatccagataaatggcacaagcatcgttatggacacaatgatcagtatgacatgtattaaaatagtggttaatttcttttttgtttccatactatccatggttaatccccctttttagttgtagaatacccatttcttctgaccgatcatctggaatactgtcaggatcatggtgataataagaagtactactacgatcgtagcgccgtatcccatgttcttattgataaatgcatatttatagaacaggtaaaccagtgactgagtcttggtaagtgccgggtttgacttgtcaataaccatatagatcaggtcgaatacctgaagggatccgatcacacgggtaacaagtacgaagaaaatggttggtgaaagaagcgggaccgtgatgttaaagaatgcattcacgcctgttgcaccgtcaatggatgctgcttcataataatctctcgggatttcctgaagtcctgacaggaaaagaaccatattgtaaccgatgatagaccatacaccgatgatcgcaactgcaaatactgcaattttcggattagaaacccagtttacatgaacatggaaaacgttattgataagaccataatcagagttgaacagccatctccataccatggctaccgctgccggagctgctaccatcggaaggaagatgatggttctgtaaacagaacggcccttcatctttctgttaagaagtactgcaagaacaagtgcgatgacaatggaaaaaggaacctccacgatcgcatatttgaatgtgttgatcagtgcctgccagatctctttatctgcaaaaaccttctgatagttctgtaaaccgataaagatatttcctttaccaaaatctcctgttttgaaaaagctctggtaaatagtctggaaaatcggaatgatgttcaatacgatcaatccgatggttgttgggagaataaacagccagccccagaggaactcactgcgctctctctttgtccgtgcctgtgacttggtagttttagccataagaatcactccttctattccttctatgtatgaggccgctgcacctgagtgcggcggcccctctcattactgcacttaattatcggtgtttcttaatgcttactcctcagccagcttctcgttcatctgatcagccatctgcttgcaagcctcttccattgtgatgtcgcctgtgtatacgcccttaaggatctcgttgtcctcgttctcccatgttacagtagatttggagtatggacggatctccatgtcatccatcatgttcagataagcctgaaggttgaagtctgcggatttagcccatgcatcagatgtatctttgtatgcactcattgtaacaccaagctcagcctgtttctcctgagcctctttggatccgaggtactcgatcagctgccaagcttcgtctgtgtgctcaccggaagcagatgctgcccatccaagtccgttatatgaggaagctcttctgcctgtctcagcgtttttaggaagctctacacaatcacagttcgctgctgtgtactcgttctctttaaatgctgcaagcatccaggagccctggcatgtcatagcgatcttgccagcctcgaaaagtacgtcctcgttgttctcggacattgtctcaagagacgggatcacgccatccttgatccatccttccagtgtctgcatagctgcgatcgtcttctcatcatcccagccggattttgtcttgtcatcgctgatgatgtatccgccgttatcatagatcaggttgtagtatccggcctggttgttatcatttctcattccgagaccgtactgggaaccatcatccttagtaagcttcttagctgcctctgtaacatcatcccatgtccagtcagctgtcggataatcaagtcctgcctcgtcaaataatgtcttgttgtaccagagagcgattgtatctatatccttcggtactgcataatatttatcatcgtatgtatacagtccccagatatcctccggatagttctccggatcgatcagatcgctgtctttgatcttatcggtcagatcaagaagcatatcgttggacatgtatctctgactctcgttggagtgcatccagaatacgtccggaagggaaccaccctgtgcaccggcctcgagcattgtccagtactcatcccatttaacaacggagatctctgtcttgattcctgtcttctctgtgaagtctgcgagaatttctttgattcccggctcctggttggtgtcccagatggatacggaaagtgtaacatcgtcaccttttgcatataccggaactgctgtcattaccatggcacctgctaacaataatgctgctactcttttgaaattcataacttcttcctccttttaaatctttcttattttccctctttcttttggtcagtttttatattttttcacgtccctgaccgttgatattattataattgcacatggaaaaatgataaatggattattgtcatttcaatatggaaaaatgttgctttttattcattttatccatttttcgttcacactttgttaattatccgtcatttttccagtttcttttacgttttttttatataccctcacaatttttactatttttgagtatgttttggcgctcatttatccccttgtagcaaaaccaacatttttacatatgtatttttgtatgtttttactaactcaaaacatgtataaatgtcatttgccgaataatctgtttttccgttcctaacacaattccatgcacgctatcatttccacatgtgcacgcaaaattccatatttttttatacagtcctataaaccgttctgtatcctgcgtttttcctgccgaaaaatttcccggctgtactgtttttctcaccgtcagatgtgtattgacgatccgtattcgctgcgaagcatattgctgttcattctgtgaccggcaatacgcttcgtgatgcacaagatacttatctgcgttccctctctttacacacagtcaaaaactgtgctaagattagctggatcggactttacacctatagtctgtttttcatttctatatttctatataaggaggttattaacagttaaatataaattataaaatcatataagtacatgtttggttttataagatattagagtggaatattattgaaaggagttgatgctttgagtaaatattattctatacatgaatcttcaaaaattataggcgtatccgcccagacattacgaaattgggatgccaatggaaaacttcatccgcatcatactacagtaagcggctatagatattattctgacgagcaactcaaccaggtaataaatgtaaagcctaaaaatcgcattacaattggatattgtcgcgtttccagccataaacagaaagatgatctggaacgacagattgataatactgaaaaatcccaacagcaggaacttgttgaagatctggttcagataatcacagtattcagttgcaaattacaaggaaaaccagcgaataaagctaaggaacttatccgggaactgatacaggaggaagtagatggtaaaagccataaaagccataaaagcaatgttgataccaaacaatgtacagaaaactaagatgtttcagtacgcaggtgcttcaagatttgcttataactgggctttggcaagggaaatagaaaactatgaaaaaggcggaagattcatttcagatgcagaactcagaaaagaatttacaaagcttagacattctgatgaatacgcatggttattgagtatttcaaataatgtaaccaaacaggcgatcaaagatgcctgcaccgcttataagaactttttcaaaggtttgcagaaattcccaagattcaagccaaaaaagagatcaataccgaagttctatcaggataatattaagatacaattcagcaatactcatgttaagtttgaaggattttcttcgagcaggaaaagaaataaacaaaaactaaattgggtaagacttgcagagcatggtcgtattcctacagatgctaaatacatgaatccgagaatatcttttgatgggttgaactggtggatcagcgtatgtgtggaatttcctgattgcatagaaaaacttaatgatgatggaattggtatagatctaggaatcaaagatctggctatttgctctgatggagctaagtataagaacatcaataaaagtcagaaagtaaagaaactggaaaaacagaaacgcagattacagcgtagtatctctcgctcttacgagaaaaataagaaaggagaaagttactgcaaaacaaataatgtaatcaaaaaggaaaaacttttattaaaacgaaatcacagattaacaaatatccgtaagaactatttgaatcagactacatctgaaattgtaagtcgaaaaccaagatttatttgtattgaagatttgaatgttagtggaatgatgaaaaatagacatttatcaaaagcagttcagaatcaggggttttttgagtttagaaagcagcttgaacacaagtgcagggataaagggatccagcttattgtggctgatcggttttatccatcatcaaagctttgcagttgctgtggaaacattaaaaaagacttgaaattatctgacaggatttataaatgtgattgtggaaatgtcattgatagagattttcaggcatctataaatctcaaggcttatggagaaagagctgcaagctaacactaaaacgttagtgcaaatatgtacgggtacgttaatccggaatttacgcctatggagagtacaagaacttgtgagtagatagatatttatatcatcaaaagcatactcgttgaagtaggaatgaaacatagaagtttataactttttataagttttcagtaacggtatttcgttatgaatcttttaaatgaagataatgtcgtccatgtatttctcaacaagctgggtgacatcgtgatcgccaatcttctttttattctctgctgcatccccgtgatcaccattgggccatcactaactgccctttatcactgcatgatgcgtacagtaaaagggaataacaacggcacaacgaaaacatttttcagagcttttaaggaaaacttcaaacagtcactgatcatatggctgctgatccttgctgccggaaccatgctcatcctgaatatccgctttctgctccatgcagaaggaagcgctgcacatatgctgttttatctttctgtgggggttctgactttgctgataatttttactttatacatattcccggtaatcgcaacctttgctaatacactgggggcactttgcagaaatgcatttctgctggcatttatgcatttccccacaacgatcgccattgcggtgatcacgatctttccattgtatatgacatatctcgatgcaaagctacagccactttacgcatgctgctggtttttctttggatttggacttgtagcttttataaattcgatgctgttgtatcgattttttaagaagctgcttcctccggaggaggatatttcgcttttgtgatgaaaagcttgggaaaattgttatttatttagatatagtatttttagatatagtattttcgcttttcaaagcggaggaaatctgcgagggggaaagcactcagagttgcgaagcccgtttttccccctcgcgctccccctttccgggcacgcaattgttgtgcgttgtcctacactctcctcaaaacaaccagcccatcattctcaccaagaaccacattccggccaccattcagtacatcaccctcagtctctccaaggctaacacacctccactgcccctcaggcaaagtcacacttctgacaacctccccctgcttccaaacaggcgccaccaaaagcgcatcaccaaccataaactgatccatcaccctctccataccctgtccagggaaaacaaactccatagaacgggcaatcggctcaccagtaactttcgcacactctacagccttgaaaatctccggcagacatttctctctgagcgccagcgcagccttaaccttctgaaaatccgcctcaggcagcaccctccacggagaagccgaaaactgcatcaccggcatcaaagccgcgatctgtgcataccgcacaaacatctccggcgtacacgcattctcattcccattcaaaaagcaggtatactcacccccgccaatcatatccggactgccaaaaggatgcccagtaagcccctggagcaacgtatccgggatcaatcccgcaataccactctcatcccacttcgtctgcttatcacaaagtctctgcatcagagaataacccccggcccggaaacacactctcagctcattaaacgcaaactgctctccaaactcagcccaaagcctggacaactcatccgtagaaacatcacggaacagcttatcacccgcatgataataacaaggatcacccgcgtccagtttaaagccatccacacccatatccgtcagaacatccagctgatccttcagccacttcatcgcatccggattcgtcagatccaaagctgcagaatacccattccaccactccaggatacgaggttttccctccggagtttcaatcagaaaatgcttatccctagcctcccggaactccaacgtatccggagtaataaacggacagatccacagcatcacagaaaatcccatctcatgcaattctttgagcatcgccttcgcatccttgaaattatcccccctgaactgccaccttccataataaggagaccagccatcatcgatcatcataacaccggatggaaaaccattttccagaataccttttgcatatttcaggatattcttctgggtctgataataggtaagttcgatccaggaattgtataccggtactttgaaaaacctgtctgaaagtttgatctcatgaaatggaaaatgcgctttcatggctgccaggtatgcacctcgcagatcattgaagccatctttcagaatgataggttccggaccttccgccaggatctcaccatttctgaaagaaatgtgaaaacctgcatcgctccagatgtagcggcctttcgaggaaaggaataaaggcatgatctgattgtgggttgggttttcgcggaaatcccagtccacaatgtcgtctgcacctacgggctggcggtagccttcatagactgcaccaccgtaccagaattcgttttttaatatagttgttttcatgttaaggctcctccttttatatgtaaatctatttttttaatgttgaggttatttttgggggtattagtgtgaatttatccgcttttcaaagcgtaggaaatctgcgagggggaaagcactcaaagttgcgaagcccgcttttccccctcgcgctccccctttccaggcacactatattgtcgtacgctgtgggaatgtgttaatgtattggcacggcgatgtattctacggtattgataatgctacgctccgccgatgtattcatcccgctccttcaaccacattttctccagccgcttcccgtctcgcctgtactcccacccaccactgccactctatcccttccgccctgaaataccagcccgtgaggtttgtgctgcctgtcggcggactctgcagaaggggtgctgattcttagccgctggaaatctgcgttgcttcaaaaattctcgctgtctgagcggcttcagacgcgagttcgagaatttttaaagcgcttttagcagattttcagcggcttagaagtcagcccccgacgaagccccgccgacaggcagcacacacctcgcgggcgtccgtatatccatatccatccttgcccttcccacacccaatattgtataatcacctcatacaacattccatcccattttgtgacccaaaattgcgtttttgttgaataacccaaaaacaggaggcccacccaaatgaaaaacgattccaaagaaacccaaacccagcacaccctctccgtctacttctgcggccaggaagactgcggcccgaaccactccttcggcccggccatgcgcccacactaccttctccacgtgatcttccacggcaaaggcatctaccagtgcagcggtcacacctaccatctgaaagcaggcgacgcctttctcatccgccccatggactccatctactaccgcgccgacacctccgacccctggagctatgcctgggcaggctttgacggctccgcctgcaaagaaatcctgaaacaaaccgtattttccgacacccccatcttcaccccggaaacaccctcccggcaaaacagcctcctcacccacatgcaaagcctacttgacaccttttccgaaaacaacggaaacgaccttgcctccacaggaaacctcctcctaatattatccgccatgcaaaaaaagccctccgaaagcaggaccgacatctcaaacctgtactttcagaaagcctccgaatacattagaaacaactatgcctaccccatccagatctcagacgtggcacactacgtaggaatcgaccgttcctatctttaccgaatcttcatggaacatgaaaacacctccccaaaacaatatctcctgaaacaccgcctccagatggcagcccagcttctctgctcctcctcctgcaccatcacagaagtagctctctcctgcggcttccgggacgctccctccttctgcaactacttccgccagggaaccggctacaccccaaaggaattccgcaaagcctacagcggaaccatctacacctgaccagacacccgcactccgtcctttaccagccggtcggaagatgatagctcctaatcgcagttataacagcagaccgaaacaattccataacagcaaaaaaagacggaaaccatcccgcagactctgcaaatgatctccgtcttttattttccggaaaagaaatgcttgataaacacatacaaaacaataataaaagcaaacacataaccaaaggcgcccaacgccggaatcccccacagctttggtttcatatccgtagtacagataatactagaactgatcagaagtgccatcacccacagccccatcacaatattccgcaccagccgccgcaaaagccacgccagatcatccgaggcatgaagatccagattgatctttgtctgccccttcatacagccctgaaggaaatccgccgccagagaaggaatatccactgcacgtttcagcgaccaagcaagattttttccttcttttttgatctcacgcttccagttcccattgctcaaaaactgctccttgagccttgccgcagcaatctgtgtcatattgatgtccggacagatctcagccagaaccccctccacatgggtcagtcctcttgcaagcatagtcaatccgtgaggcatcatgatcttattctccttcatgacctccatcaggtccaccatcacctctgccacatcaatgttccccatatccgcagtaccatatttctccataagtccgcggatatcctcataaagcttgctggaatccggtttgcctttaaactccccaagagccaggaccgcatcctggatcttgccgatgttgttcatggcaaccccttcaatagcttctgcgatcagctgacgatcgtgctctgtaagccgccccatcattcccatatcgatccagacaatctttccatcctggatccgcacgtttcccggatggggatccgcatggaaaaagccatcctccatcacctgtttgatgaaattatccacatatttcgttccgacctcattaagatcataaccattgaccagaagcgcagccttgtcattgaccgcaaaaccgtcaatatattccatcacaagaatatgcggcgaaatgtactcacggtagaggatcggcactttcacaaaagccacatctttgttcttttttgcaaattccgccatatttgcagcttccgtcaggaaattcatctcctcctgggtcactgtccacagctcgcttaaaaccatgttcaagtccaccatacccttgatgcttaccggcggcatcagacgcacagccttatgcatcaggccgatatcccttgccatggtttcatagattcccttacgctgaaccttgatcacaacttcttctccggttttcagcgtagcgcggtgaacctgggcaattgaagcagcacccagcggtttctgctcaatatgctgaaattcttcctgccacggacaccccatggattcctccagaacctcgatgacctgggaaaatggcatgggtggtacatccgagcagagtttcatcagctcatcacagtatctcttgggaagaatatcggaacgcagggacataatctgacccaacttgatataagttgggcccaggtcttccagtatgagccggagcttctcaggagaaacaccccgggtaatggcatgctttttcagaacggctgtgatctctctcagccgttctccatatccgcttttttcttttttctcctgttcttctctggccataaaattctccgtttacgttattaattctccgacagctttcatacttcctctttgtgcttaaactgcctttttgtttctgttccaccgtcttgttctgtccggcttcttccatgagttctgctgttttctcagaagtctctttttattctgcctccggagcttcctcactcccgccggctgcttctgttttctcttcttcaacagtctctgtggctgcatcctcaacaggctctgctacaggtacttcttcctcttttgcagctgcctcagcctgcatgctctcgatctgtgccttcacagctgcaagctgctccggtgtgagcttggagatcgtcgccttaagctcctcctgctcgttctttctggctgcggattctttcacggaatctgctgctgtcttaacagttgacttgatattgtgcttcagctcctgattgaggacctttccctgctcaacagtaagctctcctttttttaccagctcatccaggatctccttagatttctctgctgtcactgctgctgtaccaatacccgccagtaaaattttcttcagtccttcacctaattccataatattttctgccactcaaaatgtgattaaacatactcaaatcgagataatgcggattctcacgaataccgcttactgtttctttgtgtatgcttttgagtaaccggagttatctctactcacagatcctaagtacactccacagtcgttaattcccgaaatagccttcggtacatacttacgtttgcgggatcatgcaacttcgtaagtctctgcatctctcagattcagtgctgcattgagatctctgtcctcaatatatccacatgtgcatctgtagatcctgtctgaaagtttcagatcttttttaatacagctgcagcagtggcagatcctggaagatgggtaccatcggtcaactaccctcagttcgattccatattcagcacattttgttttcaattttgtccggaattcatagaatttctgggacgcaactgcttttgagagatgccggttcttcatcatcccggatatgttcagatcctcaatcgttatatgagacggcttggttttcactatctcagatattaccttgttgatatgatctgtacggatattttctatccgatgatgaagtttctgtactttaagcttttgtttgcatatatttgctctttgagtggactctcctttctttaagttctcatatttacgggaaagctttcgctgtgcccgtcttaattgtttctcaagttttctgatccgtactgttttattgatatttctgtatacagttccatttgacacaactgcaaagtctttcagccccagatcaattccgatcccatcagtgaaatttccatctgcttccggagcaggtatatcgacaagtgcagacacataatatctgcctgctttcatggaaactgccccgcttcggatcacatatccatccttagaggtcggaacgtaacctttttctttcagccttacccagccaagtgttgggatcttgatcctgtgacgttcacagagacagtctttgggattattctttacaaaatacatttttacatcagatcttccttttttcttatatctcgggaaactactctgatgatgaaaaaatcttgaaaaagcggtacaggcattttcgattgcattctttaccgatttggaactgacttctctgatccagaaatattccggatgccttggaaggtattcattgttcagccatacactgaacgacttgccgctcataaatctttcaccggcatcataacgttctttattatgaaacaggtagaaattataaatatatctgcatgtgccgattgtcttatgtattttgatcttctgctcttctgtaggatcgatctctgtcttgaagctcttcagcaatctcctcatccttttctatctgttttttatacttacgaagtccatataatctacaggaaaacacatgaaggatggaaataatatcctgtacaagttcttcctgtggtgacagttcttcattgttcaccaccagtatcgttgtgtggaatttcatgcagaatctttcaaaccagtcgtatccaaaacggataaatctgtctttatgtgtgatcactatggttttgaccttctgctccatgacttcgtccagtaatccattccatttcttgcggttataattaagtccgcttccatagtcttcaatgcactggtctacgatcattcctctggcattacagaactgacgcagaaatgctgtctgattttgaagatcatccctttggtttttggtagatactcttgcataaataacaacttttcgtttatcatgttctatatttatacctttaaattgaagatactggtcatatgtgtaataacgcctgtctgttggagttcggtttgcttttaagattccctctctgtcccatctctgaagcgtttttacagaaacacctaataattcagcaaaatcttttggtttataatttgtgatatttgatgtgtccataatatacctccataagtacatttaaacacatttaatatctttttacaatatatttagttacttatatcatcctcctttcctgaaaccggcagctgccggaccatcacaccacagtccgacaccagaccctatcctgaaacaaaagttttctgttcctgtcatattcccagaaaagcaagtcccttgggaacaaaaatgatcagtccgacgatcgctgccatgatcgctgcgatcagtactgctccggccgctgtgtccttggcgatctttgccaatgggtgacgttcctctgtgaccagatccacaacagcttccactgccgtattcaccagctcaagcgccatcaccattccgaacagccccaggcagatgcaccactctgtcacggaaatcccaaggatcaatcctgcgatcaccacaagcgctgccaccatacagtggatcttcatatttctttccttgcggatgcaggtaaaaatcccctgaaacgcatatccgaagcttttatacagcggatccttctttctgcctgccatgttcctcacctgatttcctgtttgaattattccctccaacgggaagtatgggattattataacaagtttgtagtaatatttccagtattccggaaaatttatgaatatttaaggagtatatgtggttattcacagacaactgttcaagcggataaaagcatccgcattcagttaaaccacacatactcctgatcctgttgcatattctgtaaaatttccggatatcctgaattatttttccagatatatatacagatgtcacatattattccacatttttcagcgcttcatccatgggcacatgacggatcctccggaattccagcactgctaccactgcataggctgcgattccgatcgctgtcattttcacatagatcatgggatccacccacatggtgatccatcccgaaatactggaaagcatcatctcgcggaacagcacttccatgatctgccgttcaaccggaaggcttaacagcaggcagaacaccaccacaaatgatgtggaaagtatatacaaacggctgatctcaccatttgtatagcccaggatcttggtcatggaaatcgactgggcatttttttcgatgatgaccttggaaagcagatagatcaccaccaggaaaatgatcacggaaaatccatacatcattcccatcatatctcccatggagacatccagctgcctggatatttttgtaagagcttccagatcaatgacagagccgatatattttgaagggatatccctgatctctgtatcagagaaatatcctccaaaataatcatctccaagatcaaacgcctcattcagtttatctctttccataaatacacaaaggcttgccgcataatcatagattccatctactttaaaggaatactcatccttctcgtatttttccttcaaagttatggtatcgccctccttgatccggaatttatctgcataagcactggaaatataaacaccctctcccgaaagatctgcacggatatacttgctatccggctccacaccatagagagtgatctcctcacttttatatttaccaggcatggtattcagggaatatgcagaaaatttttccgcatctttattgtccgttctgatatccgtataatattccagaagagaattcatggcatccgctttatttcctgaataggcacttgccggaaccgaaagtatgtactggtatttcgccagcatattctcctggatctccatctgataatgatccagcgtagacggcaggagcatgccgaaaaacagcagcaaatttgcaaaaatgactcccacaaacagcaccagataattgctgacattctgaaagatcacccggaggcgaaacctggaaaaaattccgatcttcggacttaaatacaccgcgcgtttctgtcttttcccggaaaaatcccttctcaggaacttcagaggcgaaagcttcaggcggtaccagagcactgcatgatcgatcagtatcataatgatgaccggaactacagttgtcagaagaaacgcatctgcattccatacggtcacataagtcggcagactatagctcccgtaatacatgtctgcacatacacccttaaatacggtatatccaagaatatttccgatcaaggcaccggccagcgtgaccagaaccggaagcgtcatataatgaaagatcagctcccgcctggtataaccggatgcacgtaacgtaccgataacaccggcttcctttcggatcgtattgctgatggtaattccaaacacaaaagccatgatcacgatcacaatataaagaagcgtgatgaccattgccctgtctccgcccatatcatcaccggtgaaaatgatcgcctggttaagataacgtgggacaaaggtttccagagctaccactttgccaatgtcttccatgagattttcggaaactttcttctcctctttttcgttctttggctgatgatcatatatccatgcataattgtaccggagcttttcctgatccaggttttcaaattcctccggggctacgatcgccacaccaaactttacagaatcaaacatggaatcattattattctgaaacagggcactgtaatccgaaagtgccaccaggcctgtgatcttccaggatttttcacctctgatcagggtatctcctaccttaagactgttgttatccgcatacatacggtcaatggcgatctcgccctgccctgacggcatttctcccttcatcaggcagaccttattcaccttctcacggtttttaaaaaaacgcatggtgcttccgttatccaaatcttcttctatatagtagttctcataaagcttaacaccggcagcttcaatatccttccactgagaactgtaaatcttttccgcagtacggaaatttccgttttcgatattatatttatcaaagctctcattataagccttcagcatgcttccatcggctaccagaaagccggacacaaacccgatggtcagtaccatcagcaggaaaaccaccagatattttccaaattcccccttcagttccctggggatacgtttacgtaaaggattcttcataatgcccccttaccattccaggtcagcagccggaatcttctgatcattctgatagtttctgcggatcatcccgtcacgaagctttaccacacggtctgccatatccttgatggcatcgttatgagtaaccatgactatagtatttccgtatttgtgattgactgtttcgatcagcttcaggatttccttggaggtgttgtagtccagagcgccggtaggctcatcacaaagcaggatatccggattttttacaatggcacgtccaatagcagttctctgctgctgccctcccgaaagctggttcggaagcttccgctgatgttcataaagtcccagtgtctccagcagttcatccacatccagcggtctgtcacttaaataagcaccaacttcaatattctccctcacagtcagattggggatcagattatacatctgaaaaatatatcccagatgttttctgcggtagagggaaagcttcttttcattcatatcctccagctgttctccctgaatggtaatgcttcctgcatctgctccgtcaatgccgccaataatgtttagcagcgtggatttcccggaaccggacggccccagaagcacacaaaattctcccctttcaatctcaagatcgatccccttcagaacatctacatggctctctcctgccccgaaggattttttgattccttttatctccagaaacataaaccgctccttccattcctatacagttcttctttatatatgaatacacatatatgttagtctgaacttactcttttgtcaagaagcagacttattttcgtattttttccatatatctatatgcgctgtaccggtccggctcttgccaaaatccagtaaaacgtatataatgtgggagtatctgtatatttttaaccaaataatcttatttttaaaggagtgaatattgaaagtggaccccagcgacacttaccagataatcatattacttattctgctggcattgtcagcctttttctcatctaacgaaaccgcgctgatgtcggtaaacaagatccgtctccgctctcttgcagacgaaggaaacaagcgtgcagccatggctctcgatatcctggagaaccagacgcccaagcttctcagtgcgattctcatcggaaacaacattgtgaacatttcggcttcttcccttgcaaccacacttgcatacagctttggcggctatatggtcagcatcgtgacggtgattctgacggttctgatcctgatcttcggtgagatcacccccaagaactacgcaaccattaactctgaaaagatcaccctccgctatatcccggtctttaaatttcttatgaccatcatgacaccggtgatcttcatcatcaatctcttttcaagaggtgtgatgcgcctgatgcgtgtggatccggatgcagccagcaaggccatgaccgaggaggagcttcgtactatcgtggacgtcagccatgaggacggtgtcattgaatccgacgaaaaagaaatgatctacaatgtgtttgatcttggagatgccacagccaaggatatcatggttccaagagtacatgttacctttgcggatgtagaatccacctatgatgagctgatcgatattttccgcgaggataagttcacacgtctgccggtttataaggacagccagaacaacattgtgggaatcatcaacatgaaggatcttcttctttacgacaaaaatgaggaatttgttatcgatcatttcctccgaaagccgcatttcacttacgaaacaaaaagcatttccgatcttcttgtggaaatgaaggactccaccttcaacattgccattgtactggatgaatacggtgatatggccggactgatcacactggaggatatcctggaggagatcgtgggtgagatccatgacgaatacgatgagaaagaggacgagcttgtccagaagatttccgaccgggaatatatcatcgaaggttccatgcatctggatgacgtaaatgatcatctggatacggaactggattccgaggattatgattccctgggtggatttatcatcgaacatctggatcgtctgcctgttgctggtgacgaagtgatcacagaggacggaatccgtctgatcgtagaaaagctggataaaaaccgtatcgagaaagtgcatgtctaccttccggaaaaagatcctgaaacacgggataataccgaatcctgagtaagcaggctccagctccgtaacaagaaacagctgatgtaccgaaaaaatatttaatacttaatatcatccatatcggaactgttatcgtaatccccggctcacccgttgagccatcaggatttttgattgacagttccgatattttatattataatgatagaaaatttttatccatatttactaaatgcaatgacagggagtagtacacagtctccggatgcacagagagaagatggccggtgagaatcttcgtgactgaactgtggaagtagccctcgagcagtggactgaaccatggatcttcatgcagtaggcttcatcgtcattcccacgttacagggaggcagtataattttgtactggcagagagcagagttttacctctgaaaacaggtggtaccgcggaatcatccgtcctgagcatattttatccgatatgccgggacttttttattggaaaaatttctcgcggcagcccttatctgcttaacttttcacatcatcaaaggagggaaccaattcatgaaacagatttccggaaacaaattgcttgtaaaagccttaaaagaagaaggcgttgatgttctgttcggctatcctggtgcctgcaccatcgatatcagcgatgaattatataaacagagcggcattgacatcatcctgccacgtcacgagcaggcccttgtacacgaagcagatgcctatgccagaactaccggaaaggttggcgtatgtctcgttaccagcggtcccggagctaccaaccttgttacaggtctcgcaactgccaactatgacagcgttccgcttgtatgctttaccggacaggttgcccgtcacctcatcggaaacgatgcgttccaggaggttgatattgtcgggatcaccagaagcatcacaaaatacggtgttaccgtccgcaaccgtgaggatcttggacgtatcatcaaagaagccttctatatcgcacgcaccggacgcccaggtccggttctcatcgaccttccaaaggatgtaatggccgagctgggaagtgctgagtatccgaagaccgtcaatatccgtggctacaagcctaacaccagcgtgcatatcggacagctgaagcgtgccctcaaaatgcttcagaaggccaaaaaacctctgtttcttgctggcggcggtgtgatcatttcccgcgcgcaggagatttttacccaggttgttgagaaaactcagatcccggttgtcacaaccgttatgggacgtggcgccatttccacaaagaaccctctgtttatcggaaatctcggtatgcacggcgcttatgccgcaaatatggcagtgaatgaatgcgatcttctgttttccgtcggaacccgttttaacgaccgtatcacaggcaagctccatgaatttgccccacatgcacagatcgtccacatcgatattgacaccgcttccatttccagaaatatccatgtagacatccccatcgttgccgatgcaaaagaggcaataacaaaaatgaatgaatatgtacaggactgcaataccggcaaatggctgaagcagatccaggaatggaaggaagagcatcctcttaccatgaaagaccgtggtattatgggaccgctggatatcatcggcgagatcaaccgccagtttgacaaggccattcttgttaccgatgtaggtcagcatcagatgctggtgagccagtatgcagacatcaccgagaaccgtcagctgatcatgtccggcggacttggaaccatgggttacggccttccaggtgctatcggtgccaagatcggtaatccggatacaccggtcatctccgtttccggtgacggcggcatgcagatgaacattcaggagctggctaccgcagttctggaggagcttccgatcatctgctgtatctttaataatgaatatctcggaatggtccgccagtggcagaagcttttctacggaaaacgttacgctatgacaaacctgaaggccggtgcactctcccgccgcacagacggtcaggaatatccggaatacacaccggattttatccgtctcgcagagagctatggggcaaagggtatccgcgtaactgagaaggatcagattgcggctgctttcgaagaggctaagaagaatacaaaaactcctacgatcatcgaatttatcattgatccggaggaaatggtttacccgatggtcaagccgggcggcaccctggctgatctgatcatggattgttaggaggaatgaatgatggataaaggaatgaaaaaaagatggatctctctctacgttgaaaaccaggtcggtgttctttccaagatttccggtcttttctccggaaagtcctataacctggacagtcttacagttggaaccacggaggacccaacagtttccagaatgaccatcgccacagtcagcgatgatgaaacctttgagcagatcaaaaaacagctgaaccgtatgatcgaggtgatcaaggttattgattttacagacgtgttcgttcgaatgaaggagatcctttacatcaaggtaaagggctgctccccggaagataaagtagaacttttccagattgctgagactttcaaagcacgtgtcatcgactatggaaaagacagcctccttctggaattcgtccagaccgcaaccaaaaatgacgcggtcatcaagcttatcaaagaagagttcaagcatatcgaagttgtccgcggcggaagtgtcggaattgagtctatcagtatgatggagagataaaagctgaataataccacaaaatggaatggccgttccgcagtagcggaacaggcattccatagtagattagattttacccttcataacaattactgaacatccatgtcctcccataggctgatatggaccaaaacatacaaatactttcttccccggtttgacataaaaatcaatgtctgagtatttctttttcataatatatttgtatccttcttttgagatttttcttgcataagccttagcgatatttttcttaatagaagatttctttccataaaccacatcttgaactgtcattttcttaccatctcttaatcgataggttagaccgtattcctttgtctcaccaatccctccggcataccagttacttgtaaatttaaaactaacatatccattttgattatatgtaactttacatttatttagataaaaaatgtaagtatatgatgatttttttaaaccctcaaaataattaaacaaattttttttatattcaaatgtgttcttataatcagtcattattgatttgttaattttctttatagcagcgctcttccccttcaattgcggaagctgatagagatattctgccttatggtctttatacttttttacttgtcttttgttaacaattttgtatgaacactttgatgccgcagatacctcagaataattctcataacatgtcaaagtaaaaagaagtcctaccatacaacaaatcaataatactttttttagaatatttcttttctttttcatacttttaacctcgctttttaagttgagtgcccttgatggagctgtgggaatcgaacccactcccttcatttaaaataaatgataggcgtttgcgaaacgccataaaccgcataaatacggcactttttgttcctgaaaaccaaataactcctcactggatatggtataatagagtcgtccaaaaactataaaccgccatccaagaaaggagttattctgatacctatgataccatataaacagctttctctggcagatattttttcagattgccaagaaaaatttgaaaacgacaaacctgcatttctttccctattagaaactcatatcgacatcgatgaaattattccgatttcttttagaaatcatttttatgcatcaacgggcagaacccgtaaataccccttgcaagctttcctgtgggctttgatcatccaacgtattttctcaattcctacagaccagcttctcctgacttttctcgcttactcaaaacctcttcgtgaattctgcggttttaccaaagtcccggatgcttccaaaatcacgcgtttcaaacaggactttttagatgatctgcagctcgtattcgatcaacttgttgatattaccgagcccatctgtcaggccattgattccgcaaaagcagatatgaccatcttcgattcttccggaattgaagcatttgttaccgaaaataatcctaaatatgtcaatcggatcattcggcagcttaaggcatatgcgaaagcacagcgctttgataaatcctacgatccttataaggctgcctacgcttccatgccttcccatgcttctgccaatcctgaaatcaagcagctgtatatcaatggacatttttgctatgtcttcaagttcggcattgttaccaatggtctcggcatcattcgtcatatctctttttataacaaagattttatgacctctcatcctgacatcgttgtggaaaagaaatccgattcccctgacgaagataaatgtgtccacgattcaaaactcttgattccaacactcaaggacttcttttccagacatcctctgatcaatccgaaaacattccttggcgatgcagcttttgataccgcagaactctataagaatcttcttactggtaacacttttggtgataacaaacatttctccaaagcctatatccctctgaatgcaagatccggacttgaaaatcaggattataccattaataaagacggaatcccctgctgtccccatgatccattgctcctaatgaagccagagggcagtaaatcaaacttacgcagcggaatacctacttttaagttcgtttgtcctaaaatgaaatgggtttacgataaagcaacccagaaatcacatcgccaatgtttttgtgaaactccttgtacttcatctaaatgtggacgaatggtctacatctatccggaaaaggatcttcgcgcttatcccggaacaatccggggaaccgaagaatgggacaacacctacaaaatccgaacagttgttgaaagagacatcaatcacatcaaggataatctttgtcttgcaggacgccgaactcaaaacgagaagactttacatgctgatctgatcctttccggaatcacgcagcttattactgttgttcttgcacataagattaagcatcatgaatacattcgcagcttaaaacctctcattgcataggacttaccaactccataaagcctatggcttattaaagtgcgcctaaaatgtgtaagaattctcttttcattccacaatccgtgaaaagcaagcattctttcctgatttgcttcgagatcgctaaggaacttagcgagtttcgcaattacctaaaaataaatgatgcgcctctcccctgcgctagcaccccgtacatttcacctcgcagaaaataacctcgtctattatttcgactgatagttatcttttacccctgccattgtatccagcggcttcaatatttcagcttttgttattcatctccgatttattaatctaaaactcatcagcccctatcaatacaccatactcatacattttcatagatacatttttcgtgatgtcatccatcaggtcgattaaaaattccaggtccttatcttcttctactcctagtttatcacaaattcttttctttcgctcataaatttcttcatacaaattttcacaaggatgtccttccagaaattcatcctgtacttcaactccagcaacggtataatcttctgcctcactgatataaccgcaaaccaattcatatactttttctttgttccccatttccgtttcctcccatttattatttatctgaagtataacgaaaccgtctcatcatttcaatgattagtgtccgttttctcggacttttttcgtcatttttcgacacgcagagttacggaatccctgataaaatataacgttaatggtaatcaattattaaatgtcagttacgcttactactctaattcatatctaaatatctgtctctgttatttaaaggtatggtaataaataacaattggaacatcatagaaaaaagtatcatctttcttaaaattttcgctgtgattaatctttatcttttctatagaatcatttttaacaatccagcccaccgtcaaatccttgataggcatagtctttatttcagtaaaaccgatttcatgcaacttatcaaatagctcaccacaattttgttttttgacagacctaggagtatatggaaattccaactctttctttgaatgatatttgacttttatgtcgacatcatatgaaaacatatctccttgaacaaatgattcgttattattaatcgttacactgtcaacttcatccactacataattgctatcaatgtaaatgtcttttaatggaatgatcttaatgttattaaatccattctctttaagtttattgagtactgatacataatttccctttaatgactcaatcccatactccagagaaatcttttttctgtgaagtaccaatgcctttatcctttttttccaaaatttattttcgtcaactattttcaagtctgattcagcatccttgacattaactgctttgttagagattttatcaacaaatctttctctagagctaccatttacagcagatttttgtttctttattttacttatctttataccaaaatattgataccctatcaaccttggttgcagctgttctatcttatctgctatgaattcttcaaaactaccatatgcttctttctcatattttatgaaacagaccacaaatatattattctcattaaagtcattaaagatttcctgattttcatgtcctttaaagtgtctttcaacctttttatagacattatcagctcgacccacgtaacattttttctttgtaatattcttaatataatacaaaccagcaaaatccaaacgcttcatatacttgatatcgttctgtttactatccatattatatattctttcatcacataagcctaaaaaatctgagaccattacttccttacctgacaagatgttttggagaagtatctgattctcactaataaaatcactcaatgattcttgaaaattttccaaatcatcttttacattcattatagaattaacaaatttataaatcgtatctgaataatctcccatttttgattacctcaaaattatcttctgacaacattttcatagaaaattatatcaaaatatgatctacttctcaatcaaaagcggtcgaaatcttcctgtgtagcaagatctgcatacttataatcatcgtttctgctctcactgtacatgtcattgattaggccaattgatacctgggcaagatcattcatcgaaaggcctaactgcacacagcggagcagaaacaatggtgttgtcatttcgcgctctgttggacgaagttttttttatcctccacctctgttttaacattcaatccccacagttctataagctgtggcagaatctgataaatggaaaacgtattgaactcatccagccattcttccggtgtatctggaatcgttgaatctgcatgcttggccatgataaaagcaatgttctcaaacatctcaagagagaacatatcaagattggatgctttggcatctccctctccaatactcttcccattccattttttcaacattcttattcatagaaaggatactgcataatacgcctccccagaatgaatcacctgccccagtcgtgtcgaccgcatgtgtctgaaatgctttgatgatttcttttctgctttttgttgccataagaacgttctgttctcacaatgtaatggcaaccagctttggtcccatggcaaggagttgatctgtagcctgctcataacttttcgcctctgtcaacagagtactctcttcatctgataccttcataacatctaccaattctatgacagatctcattttttcactgcatactctttgctcttccaaagagacgagcgataatttggatcataggaagcaactctcccaatgccacgatatcaactttttcttccattttttagttcctctacaatctcgttataacgttttttatttaaccggtagaaaaataatacaaccgcagtcacaatccacagtacacccggaatcgtcgtaaatgcatgcttcataattgaaagtacaattgcattttgtgtctgatttgcaatataaccatattttccaagtaatcctgctaaaagtgctgttccaactgccattccgattttatttccaagtgaaataaatgcatactgaaaaccgtcatttctaagtccggttttccactccccatattccacacagtctggaataattgcatagattgcggtattaaatccagagaagaaaaactgtgtgagaccagataatgcataaaaaatagctggtgattctttggcattgaagaaaaacatagacaacatggaaattcctgtaaataaagcaaagagagatgctgttcttcctttgttattcaacttgcggaataatggttgaaaacaggctgccccgatgatagaaggaataataatgcacatcgaataagttgtgtagtaggaggcattcccttccacatatgtaaaataatacagaatatctgcgtttctaccatataatgtaaatccaaataatatctgccctgccaatgcaagaagatatggtctgttctgcatgactgctttcaactgtatctttacagaaattttttctttttccggagtaatcactgcctctttcgtcttcgcaaagcagaagaaatgacaggctgtaaaaatacatccatatatgaccgccaccgtcagatatcctgtctttgcactgtgactgccgaatttgctgagcagcggaactgtgataatatttaacacaccaattgcaatcatcgctgcaaccgaacgggatgtatttatttttgcacgttcatcaatatcctgtgtcatagcaccacacaaggttccatatggaatattcacacaggtataccccaaaaccagcagacaatatgtaattaccatataaatgatctttccattctgcggccagtcaggtcttgcccagaatgtcataacaagaagaatcgctgtaattggtgccgctactaacagccatggacggtaccgtccccatctcgattttgttttatccgtaagtcccccgacgattggatcattgatcgcatcccagaatcttgaaaaaagcataagtgctgacacagccgccatactgattccgaacacgtctgtataaaatatcatcagaaaattactgacgaacatccagctgaaattacatccgacatcaccaaaaccatatgcaatcttactgatcagcggtacttttccatttttgttttcgcttcccatatgcccctcctatttttatcagagtttctgacagaactctattctttcctcatttgggcccttgatcataaaaaacttcacaccattttcccaaaatggcagttcttcgattccgtctgtaataattgtgtatttttcattgcagattttctgatacatactttcaatgtcttccacatcaagtgcaacatgttggtatgcaccgtctgacattgccgcctgcccattttcaaaagtctctatacagtaattttttatctgtaaaaatgccactttttcccctgctttttcattataagactgcataattacttcaaatccaagactcttataaaactcaactgttttctgcaaatcgtttgtcggaagcccgacatgggcaactccgacaattccatatttattttccatacgaactccttacttttcactgacgttgataattactttcatcgttgtctcacggttatcatcaatatactggtatgccttcagataatctttaaaagcaaatgtctttgagatgagcggtttcaaatgcactttgccctcatttaccagtctgattccatctatataatcatcatggcggtacatcatcgtgctcttaatgtcaagttcgtggtcatttgccactgcaagatctacttctgccattcctgcaaaaacagccaccagtacgatcgtgcttccttttcttgcatatttaattgcctgtcccattgtgatattgtttccggcacagtcgtagatcacatctgccttatccggtccaaatgcttcgatcattgcctcaccgaagtctttattttgggtattcacacacacatcaattccacattcttttgcctttgccagtctaagatcactgatatctgtgatcatcactttcgctgcccccattccttttgccgcctgtgccacgagatttccgatcggtcctgctccaaggactgcaatcttcatgccagccacatcgcccatctgttttacaccatgaactgccacagcaagaggttcgatcatagctccttcttcataggacatatcttctggaataggtgttactttagatgcatccactgcaaaatactcagatgccgttcctgtcgtctgaaatcccattacttttaattcctcacaaagattatactttccatgacggcatggatagcagtgtccacaatatacctgcggctctatcgtcaccttctgtcccacatgaaactctgtgacattttttccaagttctgtaatctcaccggaaacctcatgtccctgtgttaccggatattttgtaaacggatgttttccatgataaacatgaatatctgatccacaaataccaatattcataatctttaccaacacctgattttcctttacctccggaaccggaacctctctgaaaataatttctcctggatttgtcattacctgctgtaacataattgttttctccttttttatcataattgtttcctccttatttatattgttttatttggtcttttataaattgttttattaaagtaattacattattatcctgtaaacacgatttgtcaatatgtttttcataattttatatatttcataattttaaaatacattttttgtgtatttttcacaatcaacacgaaaaaaacggaaaggaaaccgtagttactgttttctttccgttttttactataatatctttttctaattttacacaacttcttgtttttcacacatataaagcggacatcctcattcgctttgcaacctgtcagtgggagcttttaactccaacagagtgaacatccccttcccctacacttaatgccctgcgcaccagatgcggtgtactgcttatctgcgttcaaaaaatttacaattctgccatatgttttgtaaaaaagtatttcgcagctccaacagccgacgcttctttcttatacgaacaattttttaagtatgaaacatcatgctcaaagccattatatgccatcactttttctcccagtggtatcatataatctgacaatacacctcccacatcacctcctagtatgatatccatatcatatgccatccgcagatttgatatcaaaacagcaagatgatccagatactcattccatgtctgcaaaattttttcatcaccactttcaattttttccataaatgcatccagtgactgcctgttatcttgtgtcagtacacttgcagcacaatatgcatctgcacatcctgatttaccacaataacactttcttccaccgggaacgagtatcatgtgaccaaactcacctgctttctggttctgccctcgaaacagctttccatctatgcagaatgcgcctcctaaggtgtggttcaaagacagatatatcgcatttggatacttttgctttttttctgcaagcattgcagcattagcatcgttttcaaaatatactggaatttccaaagcctgctctaaaaagcgcagactataattctctatacctaaagcatgggattttaaaacgatccgttctttctgatcaataattcccggaatcgccactccaatcccaagtagcgtatccttcgctaattcgccttcaagaaaagttttgaccttttgtgccacttctgtacaataggataattctgccgtaaattttaaacggatgcgatctttttttataatctcatctccaagatttactaataccatttctatatgattcgctgtaatcaaaattcccattgcatgacagtatgacttattaatccctatactttttgcctttcttccaccggtcgaagcatattccccagtttcttccaacaccattttttctaacaagtcattcacatttgctaacacagtcggcatactcaaatttaaatcttttgcgattcccgccttggatgtaacatgattgttcagcacataattaattattctttttcttgttatattttttttatctttattttccgttttcttaccctcttttattaaatatattataaaagaattatatgcttttttattcttcttgtaaagcaatgttttataataaatctccgacagaatttatcttataaacagcaaaaagctcccgaaggagctttccacgctttagatataaaccaattcttttaacataatctcttctaccatattacgaataccatttaccaatctgacacattccctctaatcacgagctttcaactcagctctggttgtatccagctcatctaagtctaagtcgctctctatcgtgtcatctggtttttgcgcgagcaacgaggcaagccgagatgcttgcatctcgatttaccgactaccgcgttcatcgagacaagtactcttgtctcgatgttgggacaaaagaacaaccgtctccacatggaatgtcaccgtggaacgactgtcgttcccacaagcgaaggtctccccgaagagctcatttttccgcatacggaccagaagtgtcttgttgccccagagatcctcctttatcatatcgacggctcctgaaaggacgatgccaatgtgcttcatattttcctgctcgaaggcgatgatctcgcctttgctgaaaacagcggtatgataggtaatacagtccagcatggggcgacggtcttgttgggtgatgccctcaaagagaggggtgtctaaagatagtagcttgttttccattttcataaaattgcgtaaacctttgctttttgatgggattataaggtattttgggagttacgtcaaattttattcaaaataatgatattcgaagggacaggctcgccgcctttcccttcgagcttccttttctgctcaaggtcaaaaaatatggggcttacgtcagactggtagtgtaagactctatggtgggatggatatccaaatatggatgtgtttgacttattttgaacgtttgggcgtttgcaaacatacattttatgactgcatttgacttattttggaattttgcaatatgcagtcaatccaagcttgtagaagctccccattgcaccatttttaaggagccgaaactgttccgtactttcacagttacgagtgaaaatcaccttcggcgatggattttgacttgtaaccatcggcactttggcatatacatgccaaaacacctcgcggaacagtggctccttgtacgaagtaactcattccggcttccgggtagcggtgaagtgccaggtgttgtcaggggcaggtgggaggtaggttacgttgggctgccagctacaggtaagctgagggtggatggcggtagcggaatctcccgcgactgtagggcggagagtgtaggtttcaacgtaggaggtattgatcagagcaactttgatccggagcgcggaaccgtcaaaggcataagcaaggcagtgatactgatgccggaagtttccgggatagaggtcgttcctgatccattttctgaagccggccgtgagctgtttttcctcgccgtcaattttcagccagatctccaggttgtcattttcctggagaaaaagggcctcctggatgccgcggggattttcactgaacgaaaacttctggttcatcagcatccaattatccacctcccactgggcatgttctccctttggaaaggcaagacttaaatctgccgtttttttcttcagatttctgctgtgctctgcccgaagctccggcgcagcagacctctgctgaaaagcttcctttatataagcaagacagatatccggtatcctctctgccgttgttcccgctgtaatgccgattgtaacaggaaaattccgaaaacagagcaaaaactgtccaaaagcgccttccgccgcaaacatctctttccctgctttgatatgataggcataatgggacagcgcttttcctgcgcagcccgggatcgccacctggggcttactcagcgtctccacccaccaggcaggaatcagctgctcgcccttccattttccttttcgtaaaaaaagtacgccaagctccgaaatttccctagccgtcagatacaggccccagcctccggtgctatgtccttccggacttgaaagccatcgaatttcccggaagcccattttttcaaagactcgttcatcaagaagtgtcctgcagtttttccccataacttttgtgacaatccgggacagggtatagctgcagcctgaatcataatgaaacacttttccaatatcttccagaatctttttttctctcagccaggcggtctcccagtttttctcaagtcttgaaaaccagacattgttgcagcaaaaaggcgaaccggcctgcatggtcagcagatcgtaaaccgtaattttttccaaagccggatcgtactcttccggaagatcctccctgatataatcaagaaacggagcttccagcttcagctttccctcatccagggcaaaacccacacaaatcgccgttcccgtcttggaaagagaatgcatcatctggggatcctccagggtaaaaggcttccaggctccttcaagaatcgtttttccttcatattttacagaaatgctgtgaagctccgcttccttttccagtacctccagcatctctcttaactttcccgaatcaatcccgtaattttcaggatctacataaattgtttccatttttcctcctcatatacggaaaacaacccgtcttttcaggcaggctgctccactcttttatcagcagtctttggcagaaaatacctccagttctgcttttttctgttccagatactctttccagtcctgatcgttgatgaagggattttctccatcagggtcggctttcaatttttccagtttttcaaaaaatttattattttctgtatgatttcccaggaaaagctctaccttttcatccttcactttatcaatggactctatgtaaacctttctcatctgaaacccgggatccccaatctctgtcagatactctttggtcagtgtgttaaaaccaaagcctccataatagcctgcccggactgttttttctccatcactgacatcgaaaaataatgcgacacagcccgccgtatgccccggcaccagtttacattctatagtgacatttccaaatttcagaatatctccttcccggatcgcctcatccggttcaaaaagcatttcaagagagttgccactttcctgcaccaaagaaagttccggatgttccttaaacatcaccgcatccggctcaccgagatataccttacagccgaacatttttctcaggaaattaacccctcctatatgatctacatgaccatgagaaagaataatccacctgatatccgcaggattaaagccaagagaccagatcgaatgaatcagcatggccgttgcctgtgcatttccggaatcgatgagcagaagaccatctcccgtatcgatcacatgaacacaaacccaggaatcgcctgcataatagacatttccgaaaatccgaaaaggctctacatatcgtttttcctgatccagcatagcaaactgaatcagctcttttttcataacttctttctgctctgctataaagcggtcgtaatcgttttttacagacatggtaacttcctcctttattctgattttggcggccagacagaggtctcgatatgaagaccacctctgtcggcaatcacttttccgagtaccagcgcaacaaccatggctaccactgcgataactgcatagatcggctccagcacaatgacggctttcacaaagttaatggtatagagcgtcgcactcagcagcacgctgatccagagcgccgtttttgacatatgaaagctgttctttttccaggcctccggataaagcttcggaatccgcgcaatgccgatcagagtggcgattcccagaccaaacataataatctgactgatatagttaatggttacaatacttacattgaacacaatgggaatcagcagcataataagcatgaaaagcagctgaatcggtggcattccaaatctgttttctttcagaatcgctttaggaagccagccatcttttgccgcctgggttggctggaaacggaacgatgcaatggacgaattcagcgtagtcagaatcgccatgatgggaccacccactacaaaagcataataaacaggtttcggaagaatcgccagtgccgccggtaaaattgttgcggctccgttagcattttcataaggaactgttcctgaagtaaccatagccagtgtcacatagataaataccactaccgggaaacacatcaggcaggcaaaaggcatatcctttgttgcgctttttgcttcttttccaaaatagatgagtccgtaatacccatggcagcagttgataagaagaaaggttgccaggaaaaagcccttgaaaccgccggtaaacatctgagaactggaaaaatcaaaaattggctggttgatctgagtcagaccgtaaatatcataggccaccatagataccagcaggatgccgctcatcaggttattgatcttcgcaaaagcattaatacccagaagattcagtcccactagcaggaaaatgatagtaataccaaaaattttagccgaaactgtcggcagtaccatattcatgtagagaccaaaggccatagcaaaggtactgaactgaacggtaaaaatcaggttggaatagatcacaagaccgcccgcggaagggctggtgaggtttgtcacgacagaatactgaccacctgcgacacgaagcgtaccacccagaataatgtagggaaaaatcataaccagtgccagcaccgttgccaaaagcatggccagccatactgaatatccggtgtaggccatggctggccccatcaaagttaccattccggctcccactacggctccaaaaccaattccaaaaagatccaattttcccagtgtaccaggagccggttccggcttatttataatgttgttttgtctgctcattttttctctgtcctttctcttatgcttacttgatgaagcttacatgacggcagatttcggcggtggcctcgtcctttcgcttattaaagagcactttgttttcttcaaaaagattccggccttcggtgtcgatcgacacaatcaacggaccaaattcttttacatggcagtgccaaagcgtttccggcatgccaagatcctgccactgtgcctccacaatctcttccacctctgtcgctgcaaccaccgcgtttcccgccggaaaaacacagtggatcgctctataatttctgcaggcgtactccgtgttcggtcccatacctcctttccccacgattactctcactccggtatcccgcacaaattctttctcaaatttttccatacgcatacttgtcgtaggacctacagaaaccatctcaaaccggctattttccagcggacggatgatcgggcccgcatgcagaatcgccgcatttcttacatccacaggaagttcccgcccctcttccaccaggcggcggtgcgccacatcccggcaggtcgtgagatctccattcagataaatgatatctccgatatggatatcctttaaatcctcctccgaaattggcgtgatgagaatctttttttctccttttatctccagcattataaagtcacccccgaatgtgttgtgatcgtgtagttcagatctctgtcaaaaatgatatggcctcttctgtgggaccagcagcccacattgactgccacgccaatggtggagggatggcgcgccgtattttcgatatgaacgcccataacggaatattttccgcccatcccctggggcccaaggccaatggaattgattccattctccagaagcttttccatataagccgctctctcattttcattgtgggaaccaatgggacgcatcagcgccttcttggacaacagagccgctgtctccacagaggtggccacgcccacacctacgagaagcggcggacaggcattcaggccataagttgtcatcacatccataacaaattttgtcacaccttcgtaaccggcccccggcatcagcaccatggcctttcccggaagggagcagccgccgcctgccatataggtgtaaatctcacatttatcactgtccggcacaatatcccagaatacggtgggagttccctttcccacgttttttcctgtgttatactcgtcaaaagtttccacactattgtgccggagcggtgtctgaaaagttgcacggatcacagcctctttcaaaagagcttccagatctccgattaacggaaaagctgttccgcattttacccagaactggagcactcctgtatcctgacagctgggtcggtccagttctttcgccagcttctgatttttcttcatcgtctgataaatcactttcggcaaaaagccatcttccctttctgccagctcatccagttttgcgatcacatcatccggaagtaccttcgccgtatagccgatgaaattcgccatataagcggtcagtttttctacctgttcttccctgctcatgggttcctccttgatattttatttttttatatttaataatgtatccatttcttgtttctcaatatagacgaaaacgctggatctgtcaactattttttacagattcagcgttttctattattttctatatttatttttatgcaaaattcacaatcactggtatcgagtcaatacatcctccatactgcggtaaatgtgtttttccatctccttaccagccaaagcggcatctcttttttccagtgccgcatagatctgctggtgctccttctgggaacgccgcgcgtactcctcttctgtggaatttaagcccagggacaggccattccagagctctcccagcattttttccagctttccgttgcccgctgccttccagatttcataatgaaaggactgattctggttggcataatccgtcacatcattgcgttccagagcctcctctgcagtgtcaatgcagttcttcacagaggaaagatctgctccattttcacagcaaagctcacaggctgctttttccaggacggcccggacctgataatgctcccgaagcgttttttcgttgattcccagcacggtggctcctctgttctgctgcagggaaatcagcccgtccctctccagaatctggaaagcctcccgcaccggtgtgatggaaactcccagttgctgggccgtggtctccagtgtcagcgtctccccttctttgatctgttgggcgatgatcgccttgcgaagcgcagatgccacccgctcacgggccggcagcagtttaatcggttttaaccccagcatttattttccctctttcttttataattgcctgttttatctcctccagataagccttcaggccgcccgccggatctttttccagcttatgatctcttgcacggattccaaaacaaagataaatttccgtaaaagtttccagcatttttcgctgaaaatcaaacggacacttctcataaagatagcggtgaaattcgagctcttcatccggcaactcttccggatctgcccatttttccagcacttccgcctccagtgccagtcccagttcaaaaatatgatccaggcagtctccagaaagttctgccacacggacgtgattattcggcaggcgtctcacaagcccctgatattccaaaagaatcagggcttcccgcaccggcatcctggaccgggaagactgctaccgctgggtgcgctttctggatgagcgtttcgacggaaaacagaacattttcctccatggaatctccatgggagcagccacagtgctcatggcgtcggacctctgccttcccatgtccgtacggggcatcgtggaggactgtggcttcacttctcccgaggaggagtttcagcatgtgctgaagcagagtggaaaaggctatttaagcaggccgctgatctggctgacgaacctcttctgcaaggctttggcaggctatggtttttctgacttttcttccgatgactgtatcgccgagagccggcttccggtgctggtgatccacggggagaaggatgatttcgtgcccacgggcatgggcaaaaagatttatcaggccgcagccggtgagaaggagatctggatcgccaaaggcgcaggccatgcggagagttactatctccacagggaggaatacgagcataaagtgctgggatttttccacagatgcatagaagcagatgcttatgcagaagattagattattaaattgccacaggaggatataaaaatggcagaaaaaagctgcagcaatcagggctgcacaaaggagagctgcgagggatgcccctccaagaagaccagctttctggtagaccagaatatttattccaatgtaagacacgtcatcggcgtggtcagcggaaaaggcggcgtcggtaaatccatggtgaccgccaccctggcaaaccgcatggcagagaaaggcttccgggtaggtatcctggatgcggatatcacaggcccgtccatcccgaaaatgtacggccttcacggaccggccgtggctgacgataacggcatcattcccgttgtcaccgagaacggcatcaaggtcatgtccttaaatcttctcgttcccaacgaggaggacccggtgatctggagaggaccggtcatcgccaacatggtaaaacagttctggagcgatgtgatctggggcgaactggacttcctgttcgtggatatgccgccaggaaccggtgatgtaccactgacggtcttccagtcccttccggtggaaggcatcgttatcgtttcttccccccaggatctggtacgcatgatcgtgaccaaggccttcaacatggcaaaagccatgaagattccggtactcggcatcgtggagaactacagctaccttgtctgtccggattgcggcaagaagatctccgtcttcggcgagagccatatcgacgagattgccgcttcccttgagaccgaggttctcggaaaaatgcccatcgacccgtctctggcttccctggcagacggcggaaaattctccgagcagaaagatacgcacctggatgcggctgtggaaaagctctacaagctctaccgtgagaatcccaaagacgacgaagaataagaaaaagaaaaaagcgtttcggcgaaaaaccgggacgctttttctctttccggcggaaaactattcggaaaacacgctgccttccgcctggtccagggccttttcgatggcgtttaagaggatgccggcggtgtattttcccgtggcctcccaggtgatatccttcgtggactgtttttccagaatctgggcttccagctcttccacagccgggcggatcagcgggtacatggtggaggtggtttcgctgagattgttaagatcgatggctttgatccggtccggatcgacggtcacggtcacatccaccaccgtgtcaccgagggtcacaggagaggagtagacgccggccgtgtagcgctcggtggagatggacgtccgcttctccggcgccttttctgtgcggaacatcagcaccagaaggacgatcaggaccaccgccagaaacagaaaaattcccgtatagaccagttcccgcattttcagtaccaggattttcggcttggactgcaaggtgaaacctccttatttgaaagaaattttttcctcagtgcattgtatttttccagacacgcttttagaccagcataaattttttcaaaaaaggaaatactgcctctcagaacagacttcccgggaaaagggaagagaaaagaggagaccatgagacgggaaattgcagaaagcctggagaaaaacaggcatgagatggaagaacggctccggacttctcatctggggtgatgtcggtactggaaaatctttttttgcaggctgcattgccaatgccctgctggaaaaaggcgttcctgtactgatgaccaacttttcccggattctgaatacccttaccggaatgcattttgaagacagaaaccagttcatcaacaacttaaaccgctacagtcttctgattattgatgatctcggaattgagcggaactctgactttgcactggaacaggtattcaatgtgatcgacagtcgttaccgcagtaaaaagcctctgatcataacgaccaatctcactttatcagagctgaataatgccgctgatatcgcacacaaacgaatttatgaccgtattctggagagatgtattcctgtccgtatcaataaccggaatatccgtcaggacaatgcaacagctaatttaaaacaggcaaaaaaaatcctgttgaacaatcatgctccgaaccagaattgactcgaaaaagtataacacaatgattacttttcactgacagtggtactactttctttcctcatttattaccggaaatatgtcactgtcagttatctaaaaccatagtaccaaaccaaaagattttaaaaccaaaactgcccggatacgggcataaaaaggaggtgccagatatggcagataaaaaaatcatgacaccggaagaaaaagcacttttacaggcaagacaccgccaggaagaagccgaagcaagaaatcgcaaaaaagaacgtgatgccagaacacacaggttagtccaggaaggagcaattctggaaagtattgttccccatattaaagaaatggatttagattccctgaaacgggagctgatgatccggctacggggaatgtaaacgcacaagttccactcccgaagggcgcacttactcaccacctgataaatcaggcagtggtatccccttcggggctcgtgcgctctgccgagggctttatccgctgttgcaggcaacatcgaaaggaggtgccagatatggcaatttatcatatgcaagccaaagtcgtcagccgtggttccggtcgatctgctgttgctgcttctgcttatatgagctgtagccgcatgtacaatgattatgacggcatccagcatgactataccagaaagcaggggctgatctatcaggaggtgatgcttcctccaatggctccattggaatggaatgaccgggaacaactctggaatgctgtggaagaaaacgaaaagaccaaagacagccgacttgcaagagaatttgttgtcgcactccccgttgagttggataaagacagcaatatttctcttcttcaggattttattaaaaagaattttgtagatatggggatgtgtgctgattttgccattcacaatacagatggtcacaatccccatgcacacattcttcttactgtccgaccactaaatgaaaatggaacatggcagtataaaaccgaaaaagaatatctctgtatcaaagatggagaagaaaaaggatttactgcttctgaatttaaaactgctcagaaacagggatgggaaaagcaatatcgctataaagttgggaaaaagaaagaatatctgacttcctctgttgcacaggaaaaaggatatgaacggaatgataaacaccccaagagcagccgatatggcagacagaatcctatttccgaacaatggaacagtgatgaacaactttgcatctggcgggcaaactgggcagatgccgtaaataaaatgcttgcacgtaatcagataaatgctaccattaatcaccgcagctttgcagatcagggaatcaccgaacagccaaccatccatgaaggctacattgcccagaatatggaaaagaaaggcatgatagcagaccgctgtgaaatcaaccgtcagattcgtgcagataacaaaatgctccgggaattaaaagcccaggtagcaaaactggcacaggctgtagaaaaatctattccaataatagcagaaacattggaagcaatccgcaatcacatgatttttacacaatatcatttgctccacaatgagatgcaaaaagaagtgatccatgactggatgaatcattttaatccaatactgaataaatacaacaccgttaaaaagaaactcaaagctaaagttacagagcggaaagaactgaatgtgaaaaaagagaaagccagtatttttaatcccatccagcatataaaattgaatcagcagcttaccactgttaccgaagaaattgaagaactgaaatcaaggaaagagcagctaatcttccaggcagaatgctctaccgataaagatatgacgaatctatccaagaaatacgaccagatgaataacaatcttgatatcctagattctcaggacatctcgctcaaaaaacatcttgaaaaagatgccgccgctttccgggaagaaaaatttcgtcctgaacctgaacagtatacagaattgctggacaccagaatccagatacgtcctgattttcgggataagctaatcgaacagctcaaaggtactttcggtaaatattatgactatcaccgtcgtgatattgccgccaatgaggtagattatctcaatgtggaagatcctgatgttttttcccatcgtgcctgggaacttgaatatcagaggaaacaggagatgcggcgaaatcagcctgctcggactaagaaaaggtcgtatgatatggaattataatttggttcttctttgcccattataaacacaagagctgaacaaataggatttttcgtcctacctgttcagccctttgtttacctgtaaatcaattctttcaacacaatctcttctgcagcattccggacattatttaccgctctgacccattccatctggtcacaagctttcaattcttccgtaatgccctgcctctccatcatctgacgcaccagaatatccattctctcctgtgcttcatcgtccacagtattcagatgttctgtcagtctgtcttccaacatatacagtgaatacattgccggacgatgctctttcagatatgttttccgcatcattccatatttcccataatgcggttcttcatctgtactgacaagattcggatagtaaattccgtctgcgccaagtgtgtaggttccacccattttttcaaatgtgcttttcatgtgttattcctccttgaaatcagcgatgtccttagatcatcgcataatatttcagggcagccttgatagcatcttctttctctttcgggcattgcggaactcttgcattttctgattttggaagattatagttttctcccacttcaattccacatttgcgttttacctgagaaatatataaacttgaaaccttcaagccaaattctttcagcacataatctttgatttcctgataggttgctttcaactcggcactggtggcatccagctcgtccaggtctaagtcgatctctatcgtgtcatctggtttttgttgggacaaaagaacaaccgtctcgacatgtgtatcactgtccaaactcatttccatatcttcctcaataatcggaagcttgaatttgatggatttgagccactgaccgtttggctgtcgttcctcatagatatggatttcagaaatcagcgattccataatctgtcgcttctcctgctcgtccatgacagcgtacagcttttcaaaataaatcagcactttgtagatattgtcagcagtaagtttttctgcttctattgccattttctttgctctggcttcaatcaacagattctccgtatcctctatcttatcatacattttataaaggcgatcatcaaggtctgctttacgcttgatgtagtgcttatcatctgggtcaagggtatcaatctcatcaatcaaacgggacttcgtagcatagctctgacgaagctgtttttcataattggcaatctcctgttcaatggcggatgtatctatcttcatattgattttttgctgcatcatcgccgcaaacttcggattgctgaccagtttgataataacctctgcaacagcaccgtccagcaattcctcattgatttgcttcttgtattcacacttatgaccacgggtcatagtgcggtgtttgcagccataatagaagaaatccttatatttcgtgccgtccggcttgtgcttgatgcttttgttgccgtacattccggctccgcaaataggacatttaagtaatccggtcagcaggtgtaccttgttgtctttaccgttgttgaccttttcatacttcttcgcctgagcaagaagttttacttgggcttcatgccagagtccttctgatacaatggcttcatgcagaccgtcaactaacagataattttcctgctccacaagtcggtaatcattgcgagttccatgtaccttttctgttcttctcctgccgtaagcaattttaccacagtaaacgggatttttcaaaattctgcgaatcagggctgcatcaaacagaggattttttccattctgccgctgaattttgttgataccgtgattggcaaggtatttcgcaagtccgttagctcctatatcggtatgcacatactggtcaaagataatgcggattgcctcggcttcttcctcgttgatatacagcatacctttttccaatttgtatccgtagggagcaaaaccaccgttccatttaccctcacgagctttctggattctgccttccatcgtctgaacacggatattctcacgctcaatctcggcaaccgcagaaagcacggaaatcatcagcttaccggcatctttggaagaatcaatgccatcctccacacaaatcagattgacatcgaaatcttgcatcacctgtaaggtagacagcacatctgccgcatttctgccaaaacgtgataacttgaacaccagcacataggacacgccatctttaccggacttgatatcctccatcatgcggttaaattccaatctgccctcaatggactttcccgatttaccggcatcctcatattcaccgacgatttcaaaatcgttgaactcagcataggctttcattcttgatttctgagcatccaaggagtaaccgtctacctgaacggcagtagatactctcgtataaatatatacttttgttttttctttcatatcgccatcctcatttgtgccacagcctgtggcataattcagctttcatcgtctgttattttttgccgtcagttttctgttccaacatctttatcgaatttaaataatcattttccacgtcgctgagcgttcttgtcttatattttcgatattctccagtcgctttatcaacagcctgcttatgagtaatgcttccatttccaattaaaagctgctctccactcatggtaagaatgcgatccagatgctctgcccagtcctgcatcgtcattgcctgttcacgctctgcctgacgttccgcaaaatccagatacccggatacaagttgtcccatagcacgaagctctttctcattcagatagtttttcgcaacaatcgcttctttgagtgtcggctgattaccggcaaaggtggtaagtcccatgaactctttttccgcatccgctcttgtataaatcacttctgccgcagtctgtccgtgaatggcataatgaattttattctgaacctttttgaaaaaacggatagagatttccgctttcgggtcgtagtcaatgctggtggcatagatttcaagcacctgacgataaaacaccttttccgatgcacggatgtctctgattctttcaagcagttccttgaaatatccaccgccgcccagatttttcaatcgttcatcatccaaagcaaaaccttttttcatgtattctttgagaatgttagttgcccagattctgaactgtgtgccacgcttggattttacacgatagccgacagaaatgataacatcaagattatagtagtcaacctgataggtttttccatctgccgcagttgttgcaaaatttgcaacaactgactctcgctgcagctcgccttcggaaaatacattttttatatgtcttgaaatagtagatttatctctctggaacaactctgccatctggtcaatggataaccacacggtatcctcatcaaatgtggtttcaatttttgtcaatccatcttctgttgtgtaaataatcatattggatttttgattcatatcatcataattgttcaccggaacacctcatttctaattgtgcaacggggtattgcgcttttattctatgtagctctatgcgttgagaacagtagctctcgcatagagtttggacacttattccacgactattatatcattgcttttccatcaattcaatagtgtcactgggttcttcagatgtgttttcttcctccaaacaagacggcggctctggaagattatcaatatccagaaccgccgcatatttttctattaaatttgcaagtaaatcggcaaaaccattccatttatctgtcaatagtgctctcctttctttttcgtccacgttcctgcggaatgtcctgtttctcttttcctctggtcaaaacggcattaagaaaagcccgtaccctttcaggtgcgagcttgacagcatccagatacggctgagcctgttccagaagtttctcatatcgttttttccataccccagcatctttcttggctgtttcatatttctgctggtattttaatttctccgctttttcagcaaagctgctgacagcataatttttgagagtacggcattcatcgggtgtcaagacgatgttcccggtaaaagatttcttacccatcgactccagctcctgaaccgtcaccgctattccggttgccgccttagtctgtgcttgcagggatttaagctcctgctttttcttctccgcagcctgtgtagtatcgtcaagctgtgcttctttctggttcagttccgccgtcacagcttccagtcgctgcttttcctttgccaccttaaactgggtcacagtcagatgttcctcggtgctgtcacgctctccacgttccacatcggtatatccggcagctctcatgtgctgaaaaaaatcatcctgtaaaacagaataggattttcggagaacaggcttaccattgacttgcagaattggttttccatctttgtccacagcaggtttggacagccactttttactgcggctgacctgcataatggtttcctttaccgttcctctgagagcttcatccttgcagcgtttcgaccacaaaatctgtttctccaccacagggacatagaccacatgaagatgataatggaacacgtccttgccaagtgcttcggacatcgcccggttaatctcgtcagcgtgcatgactgccgagaggatatactgttcaccgccaacaatctccacagcggatttataggcttcctcataaaactgtctggcgtattcataaccgccgtgattgtcgaagtacgcagagttcacatcaaagaccatttcgttgaaatggacggcatccgccttcagacctctggtggaaatgatgttgtcagctttcatctgctcaaacatttcagcgtagctcccggtaggttctttgaagtgtacgttgagggaacttctttccgggataatatcttcgttactgtatatttctttttcacgctcattgtgtgcctgtgcatctccgatgtcattatctgtgacatccatatttcttgcacaggtacggtcaactccgtcatttcttgccatatttttccttcctttctttgggatttgcagacaggtagctttggaaaggcacttctgcggaagtgtaataacccactatgacactttcatccatactggctgcaaagtgccgtgggctctcccgaggggctctccgagggtaatgcggtcgctgcggcgacctctgccgaacatcagaaagttgtctgctcctctttccaatgtccggcacggacggctgctgttttgcgaaaccgccccgtccgttgacagaaaaaagactgactttttcctgtcatttgggtacgtcacgaaggttttatacaggagtgatttacgctcgtacgctgtgtacgtacgtaccaaaaaatcaatcccgccattcctccggtacgtacgtacacggcgaaacgtcgtaaaacccatttatattcggacgggctacggcttcaattcccatgaatccccacaccctgcgcccggcagagtttgtgattttgttggtgtgttccagattgtagcgacttaaatttgccaccacactgtcactaaagctgcgggatttcaggggcggcagagaattttcctcacaccacatccgataaatttcgtacagctccttggagctgatggaagcatccgctttcagccggatatagccctcagactccatgaagtcgaaaatattgttgttgtcacgcttgacggactctcggttggttttggtgcgctcactttccgtgaatttgaaattgttggcaaccagacgctgcaatccctcaaacgcccagaggaaaatgccctccacctcagctttcatcttctgggcgaggtcagggtcatccattcttccggcaggcttttcctttgtggtcagcacaagctgtctgcggtagaaaccgtcacttcggtcatacaatgcctgtaaatctccattggagaaagccagcagacgggcgaacatccagccctgatagctctgtttgcccttgcgctccaaatccattttcccttgagctgtcacaatggatttcacataattggtctggcgcaaggcttccattcgcatatcatcatccacgcataggaggatatgctccagatcggcacgggcaaatcggttctcagagattttaccaatgcttccgtccttcatggaactgcccagcatttgccccagcaccgcaccgatttgggatttaccctcgccgccattgcccttaatgaccatcatcctctgtcctttattggagggaatcaggcaatagccgataaattcctgcaaggtagggatgtcctccgggtaaagcagaccattcagaaaggaaagccacagcacaggtttcggagtatccgggcgatagaaaaccgggagcctgtttctcacaatatccggcttcccctctgtaaaagtgccgtccagcatgagcgtaccgtttgccagatgaatcctgtcctgctccggcgggaagtcctccacatgagccgccagcttcataatctcaatgatgttgctgattttgcggggaatgttgttcacggcacaatatttcaattcttcaaagatttcgccacgaagcggcaggtcgtccgtcactcgaccatcaggtgtgaaaaaagctccgtttgcaaagataatctgacgggttctcagaaaatcttcacaaaacagagcttcattgatactcttgccgtcaaaccacatcggcacattcatctcaagcaatttcctgttctctgacatggcagcgcacctcctttttctgctcgtccagtcgtgtttgcattcttgcaatcgttccgtctgtcaaaagttccttgacggtatcagtcctttcttcctgatcgctcataaggagcaaatcgttcagatactccacatattccagcttgtggcaagcttccacgaacctctcatccggctcgtcctccggtgcttcgggagcatatcgctctttccagtcctccaaaagatgaagatacccggacagcacattcatgcagaaaagctcgtcctgtttcgactgattcacacggggacggtacttctttacctgtgccaccacggacggcggcctgtccagtccgaaatccgcagccagtctctgcgctgcttcataggcagacaggtcaagcagccttgccacaaagtcaatcacatctcccttggcaccgcagccgaagcaatagaagtaatcctcgttcagcttcaagctggggtgtctgtcatcgtggaaagggcagcaaatcatcccggagcgattgattttcagcccgtagtgttcggcggcttgcctaaccgtgaccgccgccttgactgtttcaaaaatgttcatttgcataacctccttgatttttctcgatgattttttcatctgcctgaatatacgcagaaaaacgctttcaaccgaaaaatcaggcacttccgcaagcaaagcaaaaagccgccccgaaaacttgaaaaaatgcaagtttcgagacggcagtgttcacacaaagttggttgatattgttccgtaaatagaatataattgaagttaatatgaatcaggagggatgatacagaaatgaaatacctgtctacatttgaagttgccgagaaatggggtatctctccccgaagagttggtatcctctgcaacaatgaccgcataccgggcgcacagcgggcaggaagccgctggatcatcccggaggacgctgaaaagccgacagatgcccgcattaaaagcggaaaatatatcaaacagaaaacagacagaggggaggaagcataatggctgatacttatttacccgccgatgttcggaaaagaatcgttgatgtaatgagagaacgcaagatgacccagcgagaactggcacttcggattgatgtgaatgaaagcaccatcagccgcttccttagcggaaagaccgaaaagctgagcgaagaaagcgttatccgcatcgccagagtgttcaatgtgtccacggactttatcttgggtacgaccgtaatcccggataaaaagaactacgatatttcagaactgggattatctgttgaagctgcaaagaatctttataccggaaaggtcaacaatgatgtagtcaaccgtctgctggaaaatccccgctttgccatggttacttatatgattgcacagtatatggatgatacccttgcaagaggatatgccgcacaaaaccagatgtttgctaccgttggctctctgctgttgggacagaaccaagctcccgaagcagtacaggcagcccgaaccgctaatgccatgaaaattcccgcttatcaggcagaccagaccacgattcaaaacacctttatgacggtggttaaggaaatcaagaaagaagcaggcagcgatttggtcgcagccaaggcaatcagcaaggaagccaccgaaaagatgtttgccgagctgaccaaggggcaggatatgcagaatccgaccatcacgccggaagcagttgttgatgctattacaggcagcatttccggtgtcgatggagtcaatcaggaagctctggacaactttaacaaagccttgctggggctgatgcagacgatggtgctgccggaagatgatggacaagataactaacgagcagctctgtattgcggcgcagagcggtgacaaatgggcagaaaacgcccttgtagagaacaatctgcggtttatccgaaagacggcatacgagatatggagcgcacagcgggagctgaacgttgccctcggcattgaactgaacgatttggtgcaggagggttcattggggcttctgggctgcataagcagctttcaacccgactacgggaacaagtttttgacctatgctgccccggctattcataatgccatgctggactacatccgcaggctgaatcctacctttgaagccaaaaatctggactgtatcattcgtctggatgaggtcaaaaagggcgagaataagggacaacatgaatttatagcagattccagagtacagaacccagagcagattttcattgcaaaggaaacccacgaagaaatccatacggctctggaaatgattgatgagcgagagaaagcctatctctggtatcgctttggctttgaggacgatgtcctccatcctctgagcgaaacggcgaagcacttccatctgtcagagagcagagcaaagtccacggagaaattggctctggataacttctggctggaactgccttggtggtactaaatattcaaagaaagggacatgtaatcatggaaaaatataaaatactcatcatcgaagatgacccaatcattcaaactgaattacaagttctgttaaacggaaacggatatgaggcatccgcagttactgactttacatcagttatgcaagcggtcaaaaatactcatccctatttgattttgctggacataaagctgccacaagaaagcggctactcaatctgttctcaaatccgcagtttttccaatgtaccgattatctttgtaacaagctgcaatacggacatggatgaattgaacagtattttgctgggtggagatgcttttatcaccaagccttataacacagcaattctgctggcaaagatttcatccttgatgaaacgagcttacccgatagaacaaattgagcgtctgaattggcaaggagcgattcttcacttagaaagtagcacgattgaatatgacggtaaccaagcagaactgacaaagaatgaattgaaaatattatattatcttttcaaacacgcaggaaagatttgttcccgtaatgatattgtagattatctatgggacaatcagctatatgtggatgacaatgctttgagcgtcaatatcaaccgcatccgggaaaaactggcgggcattggcctgacggattttatcaagacaaagcatcgccaggggtacacgatatgaacagcaaacggtattggaaaaacaggcttccatttctgctgacgaaccttgtttgcatggctgcgctcactgtatttttgctggtgtgcggcaattcggcttccgcagtagtattgatcctgatcgtatgggcattgattttgctgatgggacttgtcctcacttactggaaacgaaagcggcagatgaaaaaacttctggatatggcgaagcagctctccgagagataccttatttctgaagtgatggaactgccggaacaggccgaggatcaggtttactatcagattttgaaaatggctggaaaatccatgttggagcagattggggaggtcgagcgggaacgcctggagtacaaggaatacattgaacaatggattcacgaaatcaaaacgcccattactgccatgaaactcctatgtgaaaaccatcggacgaactggacaaaagaacttctgctggaactggaaaagaccaaccgctttacggaacaggctctttattatgcccgcagtgagcatacagagaaagattattctgtccgggaaatggcactgtcccaagtggtgcatcaggcgattgcagataacaaatatctgctgctccaaagtggtatgcgcctggaagtggaggaaatgcaggatacggtttattcagatgaaaagtgggtgcgttttatcctaaatcaactgattgtcaatgcggtcaagtatcgtacgaagcagccggttctccgcatttctactcataaatggcaggatcaggttgtccttgtcgtggaggacaatggaatcgggattgctgcgtccgatctgccccgtatctttgaaaagggatttaccggtcagaatggtcgtctgattcagcagtccacgggcattggtctgtatctgtgcaaacggctctgtgaaaagctgggcattggcattacggcggagtcgtcggaacatggcacagccatttccctttcttttcacattaactgtctgattcatgaagtgcagaactgaaaagcgttctgcacttcttacatttttgttagaactttgtaagaaaacttgatacaaacgaagccactcttattttacaatagagatcagaggtgataacaatgaaagaaattttgaaactggatcatatccaaaaatattacggaaatggcggaaatgttacaaaagcaattcaggacatcagcttttccgttcaagagggagaatttgtaggaatcatgggagcatctggctccggcaagactaccctgctcaactgtatttccaccattgataccgtcagtgcaggacatatctatctggacggaaccgatgtgacggaaatcaacgaaaaacagattgcccggtttcgtcgggagaatcttggatttgtatttcaggattttaacctgctggacacgctgaccatttcggaaaacatagccctggcgctgaccatcaacaaggttccagcaggcgagattgatgggcgggtgcgggaaatggccggaaagctgaatatcacggatattctggacaaatacccctatcaggtgtccggcggccagaagcagcggtgcgcctgtgccagagccattatcaatcagcctaagctgattttggcggatgaacccaccggtgcgttagacagtcactcgtcccagatgctgctctcgacgatccagagtatcaatgaagatctcggagccacgattctgatggtgacacacgatgctttctcggcaagctatgccaatcgtattctctttatgagggacggggcaatctttacggaaatccgtaaggggggtgattcccgcaggactttctttgaaaaaatcctggatgtccttaccatgatgggagggggcatgagcgatgtacgctaaacttattttcaaaaatgcaaagcggtctgtgaaggactatttgatttatattgtgaccatgacactctgtgtcaccctattctatgcgtttttgtctatcagcagcacccattatcatccgaccattggtgcggaatataatatttccctgctggctggaggtatgaaactggcaatttgcgggattagtttgcttttgttgtttctgatccactatgtcaatcgtttcatgctgagaaaaaagcaaaaggagtttgccgttgaggcaaccttgggaatggagcaaaaaaccataggcctgctcttttttggagagacttttttcctgctcatattctctgtgtcggtgggaatccttctggggatggtcgtttctcaggtcattacggctatgctgcttgcttcttttggggaaccctacgctttttcttggtcgtttttcccggatactgtgctgttgaccgtgggcttctttgttgtttgccagattctggttggagtcgggaatgtcagaattctcaacaaaagcaggattattgagcttatgacggcaaaccgtcagaatgaaaaaccgcttcataaaagcagatggatgccgatgatctgtattttctatggcattctgctgctgtggatgctggaggtaggtactgtaaaatatcatttttacttcgattccagacatccgcttcctgtaaagctcatgtattgggggaatgtccttttccctgcactgacgctgctttgggcaatcgcaggtgctgttttacacagaaaaatagggttttcccgatatctttgcggacttctggctggtgctgtattgaccgctatcccgattttttccatcgcagaactggaaaaagcctacttccttggatttgacgctccaactctgaatcaatatttgctgtttggggttgcggatattttgtttatcatttccgcagtcatgtatttatcgaatgcggcgctcctatactggaaggagtctaaagtgtcccgcaaatatcataatacgagtttatttctgtttggacagctttcctctaagctggctaccaatacgaaaacgatgacgatcatttgtgtgaccctgactttttctatctgcttgtttgtcattgcgccggttttaacgggatggagtctgggctatttggacagtcgggctgtctatgatattcaaatttcaagccgctacaacgatgtttatgaagtggaaaatcttccggatacagactatggagaaattactgcgttcatagaacaaaacaaaatagcgataaaggacgatttgactttttcggaatatcttcccaagcaaagcgactttcaccagcgagtaaagtacaattttcctcccttggcgatcgcactgaaggattataacgctgttcggaaaatgttgggatatgaacctattatcttacaaacggatgaatttgctacccactggcatcgtgcagcagaggacaaggatattgaaaactacattgctgagcataccttattggaaactgacgcaggcaccctgaaactcagtgagaacgccgtgtttcaggagcctgtgggggaatccatctataatctttatacagatgtggtgtatatcatacctgacgaaatagcgcaagtcttgcttccggtacagcgcaaccgatttgtgatgacccaatatccgcttcccttcaaaacggcagaaatgctggaacagcttcttgggcgttcttatccagaagatcctgataaagacaatctggcaggatacagtacaactgtccatactacggaagtgaaccgtataatcgcccttaactttatcctaaaagcgtccttgatctatggtgcaattgttctgatggtgatgtgtcttaccgtgctggctcttcagcagctcctggatgcagaaaaaaacaactacagattttcggttctgcgaaaaatgggagtggaagagaaggacctgcatactttggttctaaaacagcttggtgtttggtttgggatgccgatcacagcggcaatcgttgtagcaattattgtgattggctattttcttcaaagtgtttctgctgaaatctcagcttatattggctgcggagccttgatggtacaagtagggattatcattggtattcttttcttactgctgatatgctacttcataagtacatggatattgtttaagcggtccatttcggagaactgataaagtcacagtacaaaaaggaaaagccgcctgtatgagcatttgatatgcccgcacaggcggcttgctttatctctggtaatcagtccaaaggtttatattctgtaacagttttcaggtatgtttccgggtcgccgttgagaactaaatctgcataggctgccggatcgttgtaaatcagccagtccagctctgaccgctgatatatattatcggcaacctcattctctaccgcaatcgtatcaatggcaatcatgctgccatttgcaaatttcagctccacacaggcagtatccatattgaactcacaagaaagtaaacgcttcattttgccctccttagatcatgccgaagtgcttgagcgcctccttgattgctttttccttatcgggcgggcattggggctgttttgcatcatcggacttcggtttgttgtaattttctcgctcgatgataccgcatttctgcttcacctgagcgatatacaagctgctgaccttgagtccggtatgctccagcacatattccttgatttccgaataggtggctttcttctctgcatcggtgagatcaagttcgtccatgtggatgtctacctcgatatgttgctttgcattaagtttggacaataaacataccgtctccacatgaaccccctgacagaactgatccactgcacaggcgttggtcatctgataccctgcttcataaaatgccggaaggtctcttacaaggcttgtaaccttgcaggaaatgtatacgatctggtccaccccataagccagaatcttcggaagggctttcgggtgaacgccgtctcttggcggatccagaatgatcatatccggtttctccggcacttcatccagcactttcagcacatctccggctataaagcggcagttgctgatgccatttcgtgctgcgttttctctggcagcttttaccgcatcttccacgatctccacgccgatcacctcactggcaacagatgccgcaagctgggcgatagtgccggtgccgctgtaaaggtcaaacactactttatctctggtatcccccacatattcacggacttttgaatacaggatctccgcagccagggaatttggctggaagaaggaaaacgtgctgatcttaaatttcagcccaagaagttcttcgtagaaataatcctttccgtaaagaatcttcgtctcatcgctctgtaccacatcggacagagaatcatttaaaatgtgcatgatccccacgatcttaccttccaggggaagtgcaaggagctgttctttcagtggttccagatcatactcttcctgggtggtggtcaccacatggacaaggatctcgccgcttgtgacacctcttcgaagaagcagatgtcggagatatcccacatgctgaagcttcttataaaagctggcattacgctccaggaaaaactcccgcacacaggcaaggattttcgtcatatccggatgcaccagcttacagtcatctgtattcaggatatcgtaagtgctgcccttcttatgaagtccaagggacagcggaccatccttatactcatcgccaaaggaaaactccatcttgttgcggtatccaaactcgataggacttccgtagattccatcccagtgatacaacttgtctgtatcctcagtttcttctgtctcatcactgttcttcccgatcttatccatactttctctgactgccccatccagaagttcccttacctggcgctccttcatctctttctgcgcctcataactcatggtctggtacatacagccgccacaggccgggaattcctgacaggccggttctcttgtctccagcggagatttctccagaacttctaagaggcgtccctccgcccgtccggaacgcttcttgttgatcataaaacgtactttctgtcccggaattccgttctttacaatgactttctggtcatccacccatacaaagcctttgtttggaaattccactttttctataacaccttcgtaaatttcaccttttttcataaatcctctttctgtcttataagcagcaggcagtaaatcgaatattccaaatttgctttacggtctgctcgcaaacacaatcgcttcactgcctgcattcaaaaatcaagccccggtatcgcgccggggcttcaatcatccgcttctcatattcatacactgcagacaaccattctgatctgttcaaaacagctgttccggtgaaagatcttactcttcctcgtcctcaaaataatcatcgaagtcatcatcaaaatcttcttcgaaatcctccagataatccggagcgaagaaacggtatactgcaaatgcgattcctgcaacagctgcaaccgcaccgatgatcgccagtacccaaaggactgtgttcttatctttctcttcttcttttttcttcagtgtcgcaagcagttcttcaagctttgttgtatttaaattcataacactgcaccatcctttctttctattcggctgtactgtctgacagtaaacccgtagcacagtagtttcactgtactaatatctcttaagtgttcttattataccaccatatgtctggttttaccataacttacgcaaattttcacaggaacattcttgccttcatattgcttccgatcagatctttttcagcttggcaaaacctgcgaacatttttttcactccgactttgtcaaagtcgaccgttacctcgtaatccctgccgccatctacaatattttttacgataccgacaccgaatttcacatggcgtaccgtatcaccgacaccgtaatccaggcttgctgccttgctgaccgtaaagtcttttttctggaggctggtctttgcctggaaattcatcttcatctgtgcataggcgctcttcggagatacgatgttatccaccttgggctttttctcctgaatcgtatgtccaagatccaccaattctcttggaatttcccttacaaagcgtgatacacggttgtactgggtctctccacggatcatacgctgttttgcacaggttaatgtcagttccttcatggcacgtgtgatccccacataacagagtcttcgctcttcttcaatatccgacgggtctccggaccagatggacgcatatcccggaaatactccgtcctccatacctgccataaatacattggggaattccagtcccttggcactgtgaagggtcataagaagcacataatcctgatccggatcaacggaatcaatatctgccaccagtgcgatctcttccagaaatgcggaaagtgttgccggctgtcctgcctcttccatggcttcctggaaagattcggtcttggagatcagctcatcgatattctcgatccttgcctgagcttcttctgttttttctgcttccagctctttcacataaccggtcagttcgatcacttcttccagcgtttcacggactgtataagcctctgccttactcttaagtccctggataaaagatacaaaatcattgatctttcctgctgcccggccaatggacggtacttcctccaccacacggagggcatcataaaagctcaggttcatcatatccgcatagtcctggacacggccgatgctggtgagtccgatccctctttttggcacatttaagatcctgcgcacagccagatcatcactggcattgtcaatggtcttcagatagcttaacagatccttaatctctttgcgggcataaaagttcacgccgccgacaatcttataaggaacatttgccaggagaaatttctcctcaaagagacgggactgggcattggtccgataaagtactgcacagtccttgtactggaatttcccgttgcggcgcccctggatgatctctcctgcaacatactccgcttcctcaaatccgttgttgaactgacggaaatgtactttatcgccctcttcgttctctgtccagaggcgtttttccttacgctctgtgttgttgacgatcacctcattggctgcattgaggatgttctgggtagaacggtaattctgttccaggcgcaccaccttagcctcaggaaaaaccttctcaaagcctaagatattcccgatatttgctccacgaaaacgatagatggactgatcatcatcaccaaccacacagagattcttgtatttctcggcaagaagacttacaaatttaaactgggcagtattggtatcctgatactcatccaccataatatatttgaaacgttcctgataatagtccaggatatccggattatgctgaaaaagctccacagtcttcacgatcaggtcatcaaaatccagcgcattgtttccccggaggatagactgatattccttatacataccggcaatcttccgtgcatccggatcgccgcccgcattcagctccatctcttccggtgtgatcagttcatccttggcatgggaaatctcagcaagaacagcgcgttccttgtagatcttggtattgatatcaaacttccggaagatttccttcatgactgttttctggtcgtcggcatcatagatggtaaaattactgccaaagcccagcacctcaatatgtctgcgcaggatcctcacgcaggcggaatggaaggtggagacccatacgctctccgcacccattcccgcaattttattcacacgttcccgcatctcactggcggccttgttagtaaaggtgatcgccaggatattccatgggtttacacccttttcttccattaaataggcgatcctgtgggtcagcactcttgtttttccggaaccggctcctgcgaggatcagaagtggtccctctgtatgtacggcagcttcccgctgcataggattcaatgtgtccaaagcatcatgtatactcattttgatctccatttctttttccatatgaacagtatctttatatactatcatgactttactttccggtaaacccacctctctgaaaaaaagtttctttacaagtagtatttaaaactatataatagggagcagaggtgataatgcgatgacagaaaacgaaaaagaaatgatgaacagcatttttgcaaaaattgctgagcttgattatataaaacccgatgaaattcccaatattgctctttacatggatcaggtcacaacctttatggaagataatctcgcttccaccaaacgtcatgatgatgacaagatcctgaccaagaccatgatcaacaattacgcaaagaacaagctccttcccccgccggaaaaaaagcggtattcccgggagcatctgctgatgctgatctttatctactattttaaaaatatcctctccatcagtgatatccagacccttctgggaccgatcaccgagaaatacttcaagtccgttacagaaaaggacatgacttacatctaccaggaggttttcagtatggagcagtcacagatccgttacctggaaaaggatcttatgcgccgtttcaaaagtgccggagaaatttttgaggacgccgacccggaggataaggaattccttcaccagttttcctttatctgtcttcttagcttcgacgtatacatgaaaaaaatgatcatcgaaaacatgatcgaccacatgaattcctcaaaagatacggattcctcaaaaaaagacaaataatatccggagctcacatccggtcataaacgtgcgtcgccgggcgcaccgaaaaaaaagagacagacgcacgatcgcctgtctctttttcgttacagtattatccgttatcatcacggtatggacgtaagccttattctgcttcgccgccctgctccccgttatccttcttcatacgtgcaaataccatctcataaccatcatttccatagttcagggaacggttcacacggctgatcgtagctgtggaagctcctgttttctcggaaatatcaaggtatgtacgcttatcagtaagcatcttggctacctcgaagcgctgagataaagaaagcagctcattgatggtgcacacatcctcaaaaaatgtataacactcttccttgtccttcaggcacaggatcgcttcaaaaagatgatccacagcctccgtcctgatttttttgctcattgttacgctcctttaaaatacatgaatttcgtctaatacaatactgatattttaacactctaaatcgtgataagcaagccttttagggaaatttaataaactatttctcttttttgtctttctatggcggacacatgattttcccatttccactgcccaggaaaacatttgggatttgctttttctgctgtgattgggtatacttaaaataatatccaaaagaaaaggagacttatcaaatgaatcgttttttcaacatggacaacaaattcttcgtgttcatgggacgcgtagcagacctgcttcttctgaattttctgtgcatcctctgctgtattccgattgtcaccgcaggcgcctccataacagctctctactatgtcacactgaagatggcaagagacgaagaatcttatattgcccgcagctttttccgctcattcaaacagaacttcaaacaggcgaccatcatcaatatcatcatgctcctcaccgctgctgttctgtttatcgatcttcggatcgccagagccggaagcggagctatgtacaaaggacttttcagtctgttcattgcatttgcactgatctatgcgatgatccttctgtacatttatccgatcctttccaaattttttaattccgtcaagaatacctttgtaaatgcattcctgatgtccgtccgccatcttccgctgacacttttgatgcttgtgatctctgcatctccgctccttctgatgtggctttttgcttatgtgagctacgcacagtttacatccatcctgatcatgctttttattctgatgggattttccacgctggcctactggaaatcaaagatctttgtaaagatcttcgataactatataccgaaagatgaaaacgacgaaaacgacgaagagaaaaacgaactgaaagaggcataatgaaacgctggaacgacaagccttaccactctctggactatatgctccgggagcgatacggcgaaaaggtctaccgggttgcattaaacggcggcatgtcctgtcccaaccgtgacggcaccctgggcaaaaaaggctgcatcttctgcagccagggcggaagcggagattttgcagcaaacgccgctctttccattacagagcagatcaacacacagatcaaaagtctctcttccaaacgcccgattcataaatatatcgcctattttcaggcatatacaaacacatacgctcctgtggaacacctgcgtaagatcttcacagaagccatctcccatccggatatcgtggcactgtccattggtaccagaccggactgtctgggagatgatgtactggagcttctttattccctgaaccagatcaaaccggtgtgggtggagctgggactccagactatccatgaagataccgccagatatatacggcgcggctatccactgtcctgttttgataccgcagtaaaaaatctccgcgcaggcggcatcgaagtgatcgtccacaccatcctggggcttcccggcgaaagcaggaaggatatcctggaaacaatggcttatctgaacgccatggatatccaggggatcaagctgcagcttcttcatgtactgcgtggtacagatcttgccgctgatcatgaagccggtcttttccgcacttatgaacgggacgagtatctgaaccttgtcattgactgtctggaacatctcagaccggatatcgtgatccaccgtgtaacaggggacggcccgaaagatctgctgatcgcacctttatgggccagccgcaaacgtgaagttttaaatcttcttcatcaccggatgaaagaaaaagaaagttttcagggaaaagcccttgaggttctttcaaaaagccagtaaaaaggaggattcttatggcatcaccttttacaacctacaaacttatcattttatacatgcttcagaattccgaaggggatctcactaactcacagatcacagattttatcctggaccggaaatataccaattattttcagcttcagcaggctgtttccgaactggtggaggcagatcttgtggaaatgtcttcccagtccaaccgcacgtattaccgactgactgaagaaggaaaaaatacgctgaaatatttttccagagaactctcttctgacattaagaaagaagtcgaggaatatctcaattccctgcactgcaaaattgaggaacatcttctcactcctgcggattattaccccaccaaggagggcagttactctgtccgcctgcggattatcgaaggcggtgtcagtattgttgatctcagcatcaaagttcccaatcttgctgcggcccagtccgtatgtgaaagctggccttataaatatcagaacgtctacgacaaaataatggaggagcttctctgaaaagctcctccattttcattctcacatagattctcttattccgcttcttcgtggatcttcttcatatgctctttcagtttcttttcatatcccatatcactgagctcgtaaaaatgttctccttcgatttctgatggcagatactgctgttttacatagtgattcggataatcatgggcatatttatatccgataccatgacccaggctttcgtggccaccataatgagcatcctgcagatgtaccggcacagttgtcttcttcgccttcacgcagcgcatggcctcctgtatggcattcaccgcggaattgctcttgggcgcacaggccatgtatgttactgcctgcgaaagaatgatctgggattccggcattcccacacgttccactgcctgcgctgctgccgttgccacacagagtgcctgaggatccgcatttccgatatcttcagaggccaggatcatgatccttcttgcaataaatttcacatcttctcctgcataaagcatttttgccagataataaactgccgcatccgggtctgagccccgcatactcttaataaaggcagaaataatatcgtaatggttatctccattcttgtcataacgtacaacacgcttctgaatgcactcagaagccacctcaagggtcagatggatcttaccgtccgaatcacggggtgtggtgagaattcccagttctacggcgtttaaggcgcttctggcgtctcctcctgccatatctgccagaaattccagggcatccttctcgatcaccgcaccgtagcttcccattccacgttccggatcattaactgcacgcaggatcagttcttttatttccggtatttccagtgccttcagctcaaaaatgatggatcttgaaagaagcgctccgtttacctcaaaatatggattctccgttgtagctccgatcagaatgatcgttccatcctccacaaaaggaagaagataatcctgctgtcccttgttgaaacggtggatctcatcaatgaacagaatggtcttttttccatacatgccgagatcgtcctgtgcctgctttacaactgcttccatatctttcttccctgctacggttgcattgatctgggtaaagctggcgcttgtggtattggcgatgacttttgccagggtggtctttccggttcccggagggccgtaaaagataacagatgtcagcttatccgcctttatggcacgatacagcaatttatcttttcctacgatgtgctgctgtcccaccacctcatccagtgttcgcggacgcagcctggatgcgaggggagactcctggtccagcgtttttgactttgcatattcaaataagtccatggttttcactcctgtaatttctgtaaaaaactgccgccggttctgctccggcagctgatcgattcttatttttataattttacctgtttgcacacaaaaaagcaattgtttctgctctgcggcaaagaggatgttccgttactgtttacgtcaccagcagctgatccactgtcaccaggtcataccccgcttccgtaagcatatccgcgatctccagagctgcctccacagaagtgggaaaactgtcatgcatcagaataatcgagccatccttcacttctctttttacaatttcttccacagactgaacgttttttgatttccagtccagggtatccacatcccagaataccggaagcatggtcacacagagttccagatttttgggccaggctccatagggcggacgaagatacaaaggatattctcctgtgatctcatagatctcattatttgtctttaagatctgctggcaggcctggtcaccgggaagcttatcaagctgtacatggtcgtaagtgtgattgccgatgagatggccgtctttttgcatctgttttacgatttcttcttttccctcgatattttttcccataagaaaaaatgtggcatgaattccacgcttatgcaggccatccagaagcaagggtgtatatgttgcatgggggccatcgtcaaaggtgagtgctgccctgggacggtcctcattgtccttcctgtcagacaaagtttccgccaccgggtctgctgctttttgtccatattttttctgaacactgccaatatttcctgctttttgttctgcctcctcataactcctgttttcccgcccactgctttttcccacatactgcgcctccaccagccggatcatcccctcaccggcgatcatcctgaccacctgcatccgaaacgcacggtctgaaatttttccatatccactgaacgcgatcagcagcagcgccactgtcactgcccggaaatatttttttcgcttatccatatctcccgccggatcaaatatacttttccacaatatatgaaaaaatccccgggaaaagacttttggcttttctttcccggggaatattctctgatatatgtcttattttttcaggatctcaagtgcactctcgatctcctccacgcatttctcataaccaagggtaccgttatccaggcacagattatatttcgtcatgtctacccagtcaacacccatgaaacgtttgcagaaatcttctttgcgtttgtcatccttatgcataaatttctcaatatcctttgtagttccgctgagtttcttacttgcctcacggatacggaaatcccagtctccgtaaacaaacacacgaagaacattggaataatccttcaggatcatatttgcacaacgtccgatgatcacacaggactctgtttctgccagctgccggatcacctttgcctgataattaaacaggttctcatcggatgtaaaatccttgctctgaggcgggatcagctcacccttgtagattccggactttgcaaaaaatctctgctttgtgctgacattttcatctgcccttccaaaaagctgctcatgaatgccactctcctcggatgccatgcggatgatatccttatcatagtaagaaatccctaatttctttgcaagctcctctccgatggtacgtccaccgcttccatactgtcttgcaatggtaattacgaaattatccatgtctttccccctactctccaagatatgccttctgaacggcctcgtcattcagaagatcctctgcctttccatccatagtaatgcttcctgtttccagaacgtacgctctgtccgcaatggaaagagccttcttcgcattctgctcaaccagaagcactgtagttccgctctcacttacctcgcggataatgtcaaaaatctcatttacaaaaatcggcgacagacccatagacggctcatccatcaaaatgatccttggtctgctcatcagtgcacgtcccatggcaagcatctgctgctcaccaccggaaagtgttccggcacgctgtcctttacgttcttccagacgcggaaatctcttgtatacacttgcaagactctctgcgatctctgccttgtcctttcttgtataggctccaaggagcagattctcataaacggacatatccgcaaatacacgtcttccctccggaacatgcgccatacccatctctacgatcttatgcgccggtgttcttgtgaggtcttttccctcaaacacaatgcttccggacttcggagaaagaattccggtaagtgtctgaagtgtggttgtctttccggcgccattggcaccgatcagcgcaataacctctccctgatttacatgaaaagaaattcccttcagagcctggatcacaccataatagacctggaggtcctttacttccaacattgccattgtctcgttcctccttattctcccagatatgcagtgataaccgtcgggtctttcagcactgcagatgtctcaccctggatcagtacctgaccgaagttcagaactgtaagttcctcacagataccgcccaccagtttcatgtcgtgctcgatcagaagaacagtcatatcaaaatgctcccgcacaaaacggatagtatccatcagctcctgtgtctcattcgggttcataccagccgccggctcatccaagagaagaagcttcggctctgtggcaagagctctggcaatctccagcttacgctgtttaccataaggcaggttacctgccagagtgtctgcttccttatccagatcaaacaccctcagtatctccatggcacgttcgttcatctctttttctaccttgtaatacttcggcagccttaagattccggtcagtgtggagtatggatggtgattgtgaagtcctacttttacattgtcaagaaccggcatatccttgaaaagacggatattctggaaggttctggcaattccggctttgttgatctcgatggtgctttttccggtgatgtcctggccgtccagtctaatgattccttctgttggtttgtatacacctgtgagaaggttgaataccgttgtcttaccggcaccgttgggtccgatcagtccatagagctgtcctttttcaatggtcatgttaaagccgtcaacagcacgaagaccgccgaactggatagacaggttatttacttccagcattgccatgatcaggccacctcctttttcgcttttttgcctttgaatttttctaccatgcgtgctctccagtctcttgctgcaggtgcccagttaaagagcatcatgatgatcagcacgattgcgtagatcagcatacggtagtttgcgaatccacggagaagctcaggcagtgcataaaggataatggttgcaatgatagatcctctgatatttccgattcctccaagtactacatacacaagtaccagaatggacatattgtaatcgaatacagataccttcagaagagaaaggttatgtgcatacagcacacctgcaactcctgcaagggctgcagaaatggtaaatgccagcagcttatatctggtgatattgattcctacagactccgctgcaatacggttgtccctggttgacataatagcacgtccgcttctggagtttacaaggttctgtacaataaacaatgtgagaagaagcaggatcacgccgatcaggaaaaagtaattcttgatatctttataaagagttgctgttccggaaataccaagggcacccttgaggatctgctttccgccggcttccagatgaagacctgccgcactggttgcaacgtgaagacctttgtcatctacaccaatgtaaagcacgttgatcaggttctttatgatctcaccgaatgccagggtaacgatggcaagatagtcaccacggagacgaagtaccggaataccgatgatcacaccgaacagtgctgcaactgccgcacctacaaggattgcaaggataaagcgaggaacctgcggaatggagtctgcagcaacctgtgaaaacagggcactggaaaaagctcccacgcacatgaagcccgcatgtccaaggctcagctcaccggaaaaaccgactaccaggttcagggaaactgatgcaatggtataaacacaaaggggaacaagaagtcccataagaagtctggaaagatttccagttgaggaaagtgcctgtacgatcacaaaaagcacaatgacaattccatagttgatcatgttattttttgttgttttgtttttcatattcttcatatcggccaccttacactttctcctggatgttcttgccgaacagtccggtaggttttacaagaagcacgacgatcaggactgcaaatacgatcgcatctgcaacctgggaagaaatataagcttttccgaagatctcgatgattcccagaaggatgccgccgaccatagctcccggaatcgaaccgattccaccgaatacagcagctacgaaagctttgataccaggcatggctcctgtgtacggagtcagtgtcggataagtctgacagagcagaaggcctgcgatcgctgcaagtccggaaccgatggcaaatgtgagggaaattgtcgcattgacgttaactcccatcagctgtgccgcatctctgtcctcggaaaccgcctgcatggcacggccaggttttgtcttttttacaaagagtgaaagtcccaccatgataatgatacatgcaaggatggttacgatggtgattcccttgatggtaagctcaccgtcaaacagtgtgatggacggaactttgacaacagctacgaaactcttggcatctgcgccgaagatcagaagtgccaggttctgaagcagataactgacaccgatagccgtgataagaacggccaagtttgaggaagcttttctaagtggactgtaagctaccttctcaatgacaacaccaagcagtgtacagatcacaacggaaaggatcacagcaaggatcggtgacatgccgcctcttgtgatacaggtaaggatgatataagctcccaccatgataacatctccgtgtgcaaagttcagcatcttggcaataccataaaccatggtatatccaagtgcgatgattgcatagatactgccaagactgatgccgtcttttaaataagatataaaactcataacgcacctcttttaattgtttattgataagggaaaaaggggacggttcccactaaaggtgaccgtcccctgacccctaacgttaacagaaattacttatttcatctctacataagcaccgtctttgatctcgaatgctttcggctctttatcacactcgccatcctcggtccattttgcttttccggtaagtccgtcaagctcaatgtttgccatggatgcgctcattgctgcactgatgtctgcattttccatatctggtgtgatctttgcatcgtcagctgcaagctgcattgcgtaaagtacatcatatgtatctgccgcaaactggttcgggatctcaccgttgtgagcatcgccgtatgcttttacgaagttctggctcttctcatctgtagctgttgcggagaatggtgtcagaagcataacaccctctgcaagggatttatcgaagttctctacattgaggataccatccatgccatctacaccaaagaatttaatgtcaagtcctgcctcagatgcctgctgaaggatcagcgcattgtcggaatagtagttcggaaggaaaagaagctcagcgccgctcttcttgatctttgcaagctgtacagaatagtctgtgttgctgtctgttgtgtaagcctcatctgcaactacttcaagtccgtcatcagcagctgctgcaacgaatgcgtcatgtacaccggagttgtagtcagcagcggaatcataaagtactgctattttcgttgcaagtttgtgctcggaaatgtactgagcagatttggttccctgtgccgggtctgtgaagcacatacggaactcgtttgttcctgctgtgatacagtcaagtgctgttgcggatggtgtgaagaggaatgtatcctcagctgcctcagctcctactgcgatacaggaaccggatgttacagttccacagagcatctgcattcctttatcgatcaggtcattgtatgcgttaacagccttctccggatctccctggtcatcacctgcgtcaagaatctctactttatatccgttgaatccaccgttctcgttgatctcatcagctgcgatcttggctgcgttgtatacgttggtaccgtactgtgcgtaatcacctgtcatcggtccgatcacaccgatcttaaatgtctcatctgctgcaaaaactgatgtaggcatcatcatcgctgctgtcatcgctgctgctgatgcaacgccgattactttcttccaattcttcataataatctctcctcctgcgctttgtcgcgttactaatgtttaatggtaaaattatagcatcgcatattttttatttcaagggcaaatttagttatctgttgtttttcgtctgattgcacaacgcggacacttgtccgctgtacagcttgtgtcgtttttcggcaaattgtctgaatttttttacaaaaaaatccagggaaaaattccctggactccttcatctcttaatactttacttatgcgattgctttcttagcgatctcagcaagagctgtgaagcctgctgcatcgttaacagccatctctgcaagcatctttctgttgatgtcgatgtttgcaaccttaagaccgtgcatcattttgctgtaggaaagtccgttcattcttgctgctgcgttgatacgagcgatccagagctgtctgaactgacgtttcttctgttttcttcctgcataggagcttgtaagagctctcattacagactgttttgctactctatactgtttggaacgggctcctctgtagccttttgccagttttaatgtacggttatgtcttttctttgcgtttaatccgcctttaattcttgccatttcttaattctcctcctgttcgtcttctctatcttataaatatggtaatactttcttcatgctctttacattagtagaatcaacaacagtagattttctcagatttctctttctcttctgagatttctttgtaaggatatggctcttgtaggctttatttcttactaattttcctgtacctgtttttttaaagcgctttgctgctgctctgcaagttttaatttttggcattatgaattcctccttgatttggtacttctaaattttatatagcatcccgttctgcccggctgttgccgtgaagactgagatatctaccgtttctcagtcagaaacatagtcatgcttctgccttctaccttcggagccttctctacagtcgctatatcggacagaagatctgcgaagtcatcaagcacatgcctactgctggacatatgtgccatctctcttccgcggaaacgaagtgtaaccttaactctgtcgcccttgctaaggaactttcttgctgcatttaccttcgtcttcaaatcattcgtatcaatgttcggggaaagacgcacttctttgacatcgatggttttctgcttttttctggcctctttttcttttcttgcaagctcgtaacggtatttaccgtaatcgatgatcttgcataccggcggtttcgcctgtggggcaatctttacaaggtcaagtcctgcctcctgcgctttcgccatcgcttctctggcggacacgattccaagctgagctccgtccggaccaatcaagcgtacctctctgtctctgatctgttcgttaatcattaaaccgctaattgttgtacacctccatgaacatgatagaattatttttttctttctcattaatgtagcttaagccgcacaaaaaaagcgcagacagatgtccacacttcaaataattacacctgcgcactgatggttggcccgtccgcagtactgtgcaatattgacctgagtcgcttatcttcagcgctgaggtgagagtgaactctgctttcttttcgctacgtactttaagaggataccatggtgtctgctatttgtcaactgttttttatattattatgtatttattttttgagtataaatttttcttcttccggacatactatgcaacatcggaatctgtcaagccttaccgcagtgctgacgatcagaaaggatgcgcattccggcaggctgacggtttccggtaaaatcataattatcaggaggacacttttatgacaagtcttaaatgctccgcacacaactgctgctataacaaaaattctctctgctccaggggatccatcagtgtcgaaggtgcagatgctcgttatgcggacgacaccgcctgtgaaagcttccgtgaccaggaagagtgtgctgtaaaaaattccgcagatccctgctgtgggtgtgagaccattaacatcgactgcaaagcacacaactgcacctacaatgagcactgcaaatgcaccgcagcttccatcaatgtatccggtgccaatgcgcatcgctgctgtgatacaaaatgtgatactttcagctgcgaatgctgatatcctgaacagaaatcctgtttccatacagagcagacattcctgtttcttttgatcagaaagtcaaaaagatccggcagcgttccagatggagtctctgccggatcttatcctgttcatttattatctgttcttaagaaaatccgggatctggatgtcctttttctgaacagtgcttgtaggagcctttgttccaaactgtgtggaattcatagtcggcaggctgaagcttggcatgttaaggttcataccgcctggctgtgactggcttgtttttttggtgtttccgaatacagaattggaagctctgtttccaaatggtgtgttctgaaggttattgtctgtaagacctgtagcaataactgtaattctcgcataatctgcaacagaatcatcatacatagcaccaaagatgatgtttgcatcctcacctgtaagctcctgtacatagcttgcagcatcgttggcatccataagagaaatatctccggaaatgttgatgatcacatgagtagcgcccttgatggttgtctcaagaagcggagaagataccgcctgctgtacagcctccatagccttgtcatcacctcttgcctcaccgataccgatatgagcgattcccttgtctgtcatgactgtctgcacatctgcaaagtcaaggttgatcagagccggcagattgatcaggtctgtaataccctgtactgcctgctgaagaacctcatcagccttacgcagtgcttccggcatggttgttcttctgtcaacgatttcaagtaatttgtcatttgggatgacaatcaaagtgtcaactgctttcttcagattttcgattcccgcaagtgcattgttcatacgggtctttgcttcaaaacggaaaggcttggtaacaacaccgacagtcaggatacccatctcttttgccgcaccggcgatcacaggagcagctccggttccggttccgcctcccataccacaggtaacgaaaaccatgtccgctccctcgatgatcttcttaacttcctcaatgctctcctcagctgccttctgtccaacctccggctgtgcaccggcgccgagacctttcgtaattttctcaccaatctgaagtacagtcggagctttacacagtgtcagagcctgtttatcggtattaacacctacaaactcaactccgccaatggcctcttccaccattctgtttaccgcattattacctgcgccgcctactccaattacaataattttcgcagaagactcagcctcattcgtcattatctctaacaatgtacttcctcctttatttctacctgatatccgattcagtgtaataatctattccaagctacatatacacatagttatatcatatatttttttcggtaattaatcaaccattaattttgtttttttatacttttttcactaaatttcggcactgtttctattaaccgaaacatttacaaaacaatctctggcaaaatgtccaaataccggtactatatattaagaaagcttttttatctttactcataatcggactcatcactgtaatcgctgtacgaattttcatcataatcctcagcgccttcttcctgatcactgctgtaatcagcctcttcctcggtgctgtccgtactgctgtctgaagagtcttcttcattttctgtatcttcggtatccgtactctgagcatctggatcttcggagtctgttccgtctccggagctttctgccgaagtctgataatcctccagagtgcctacgtaattgccatcacggtcatattcactgactccgtcatagcctccgtcttcccggtaaccgcccttccagtttcctttttctgccatggtttcttctgtgggggcttcgcctacataggtcatgttggcatcgtactcaccactgcctgtgtaatctccctcttcatcatagccacctacccagttttcctgcgcatactccagatccgtctgcggtttcggtcctacatagttgccattttcgtcgtattcgccttctccggtgtaatttccttcctcatcatagcctccggtccagttttctgcggaagtctggctctcatcctgttcctgctccagggtaatgttcttggaattatcatttacattttctgcatggagaattccttttttttcggaaatcatcggaaggatagccagaactctggtcattttgtcttccagatattcatcctttccaagtttaactgtgatatccccgtaaacaagacggatctgtccgtcgtcttcaaattcaatgtgatccggaaccttatcattttttgcaaaaatagtagaaagagcaactgccgtgttcatcaccgtttcatccttgatggggagtttctcgttctggatcacttttttgactttgatcccgtcaaaaaacgggattttttcgttacgttccgtggatccttccacaaaaataccgtttctgtcaaaataaatataactgtccagataagggatacagccaacgatatccttctccttcacactgacacagatggtgtgccggttcagccttgttacggtatagccttctataaagggaacatcctttgtgttctgcttagtataaagaagcggtgcaagaacagaattggatgccagcggccccctaagcaccatcttcctgatctgtttttcagaataatggttgctgcccatcacctgcacttcatctacctgataatacgtaaaaaagaaaataattcctgccagcagcaggacaagaagtccgccaactgctttcagtggctttttttttgatgttttcataaagttcctctgtcctttatcagcagaccgcccagtgcggtcagatcctcacagatatgttcatagcctctttctatgaaacaacagccccggaccctggtaatcccctgcgcggcaagtgctgcgatcacaagtgccgcaccaccgcgaagttcctctgcttccacagtacaaccggtcaggggctgccctccgtatatcacagcaactccatcccggatctggatctgtgctcccattttacagagccatgaagctgttttatatctgtcttcaaaaatcttctcgcggatcctgctcactcccgggatcgtggccagtaccgccatcgcaggagactgcaggtctgtaggaaatcccggataaacttctgtttccagaagctccaggggaaaacctgtattttttccgttgactattagtttaccacctaccctgcggcattgtccacccattttccgatatacgtccaggattccatccatttcctccagaggcggattttccaggatgatctctcctctagttgccgccgctgccatgagataggttccggcgacaatacggtctggtggaatgcagccatcgccagcttcaagcttctccaccccttcaatacagatacagccattttcacgaatccggatctttgcccccattccggtaagataatggcaaagccaataaatttccggttcacaggcgcagccgttaaggactgttttcccctctgcaaggaccgctgccagaatgccctgttctgtagcgcctacacttcttttttgaaaaaacatctctgcgcctcggagttttccacaggatgcccggatcatcccgccgttttccaccacagctgccccaaggcggcgcaaaacctggatatgaagatccaccggccgcttcccgatcacacagcctccgggatatcctgtctgtgcctttttgctccgccccagcattgctcccattaagatcacggaagaacgcatttttccggaataacactccggtatcatggtgccgtccgcatggctgcagtccagataaagatcttgaccttcccaccaggtttctgcccccagatatttcagaatcttttccatcaaatatacatcactgattctcgggcatccccgcagtacactggtcccggtacttaagagtgctgctgccataaccggaagtgccgcattttttgacccctggatccggacgcttccatgcagcggcctgcctccggtcacgatgatctcatcgatctcattcaagtattccactcctaaaagggcctcttacttgttattctatgtgatccttccatgtctgtgactgctgacacttaaggccagccccatttcccccagaagaaaaacaacagaagttccgccatagcttacaaagggcagagtgatcccggtgttgggaatcgtattcgttactactgcaacattcaggactacctggatcgccatatgtgccatgatcccggcgcacagcagcgttccctgcagatcccggcagtttaatgccagaatacaaagcctccagatcagaataccaaacagaaaaagtgtcagaaaggctcccagtatccccgtttcctcacatacaatagaaaatatcatatcattctgggcttccgggacaaatcccagcttctgcagactgttcccgaaccccttgccgaagatccctccgcttccgatcgcatacaggccctgtatggtctgaaatcctttttcatatttttccggatcccgccagattgccaggcgttccagacgataactctccgcggcaagaaaaaccgcaataaatcctatccccgcacctccaagtgcgagaaactgcagatacctgggattggccacaaagatcagcagcacaccgatccccagaatgatcaccgctgtgcttaagttattggagcccaccagacctgctaccggaagcaaagtcatcatagtcctgcagataaaccagaatccggttgttttgctttttgtattgctgatctgccataccagaaacaatatcactgccaccttggaaaactccgacggctgaaaggaaagcggccccaggttcagccacctcttcgatccattgatctcctgtccgaaaagcaggactgcagcagacagaaaaagcgaaaaaatataggcagccggcgccagctttacagacagccggtaatctacccgtgatgccagatacataacaagcagccccagtgccgtggcaaagagctgctttttaaaataataggcagagtcgtggaaacgtactctgccattatattcacttgccgaaaaaagcgccccgagtcccaataccaccagaatcagaaccagtacccaaagaacggtatctgtctttccggtctgtttctgtcctgccttcatgcatggcctccacagtggtctttatttcagcttatgtatgtatttttcggattattacagtgctttcacgtattccttgaacatgtcaccgcgctgctcataattatcaaactgtccccagctcgcacatgccggtgaaagcagaactgcatctccgggattggctttttccgcacagacccggacagcttccttcagatcctcgcagaggatgatatctgtaaatccaagacgttctgctgctgctttgatcttctctttcgtctgaccgatgagaacaagataacggacttttccgtcgaaggattctatccactcatcatagctggattccttgtcatagccaccgccgatcagaagagtcggacggttcattgcctgaatccccttgatggccgcatccggattggttcccttggaatcgttgtaatatgcaacaccgtttttctctgtcacatactcgatcctgtgtggaactgccacaaactcacagacactcttgcggatactctccacagaaacgcccgcataatatgccatggcggctgctgccattacattctcgtgattatgacgtcccaggatcttaagctcttcggtttttacgatcgggatctcttctttttctgttttgagaatgatctggtctccgtccagatagattccccgatccagtttgcgaagacttgagaaatacaccaccttcggaacgatattttcaccgaatttacgaaggacttcatcctcgtaattcagaacacatacatcttccggtccctgatttttggtgatcagctcttttacacggatgtattcctccatggtatgatgacggttcagatggtcctctgtgatgttgaggatcgcacttaccttcgggcggaactggtcaatagtctccagctgaaagctgctgatctccgcaacagttacggaatcctccctcatctccaatgatttggatgtatatgcagttccgatatttcctacaacaaatacagattcacgggcatctcccatgatctttccgaggagtgctgttgttgttgtcttaccgttggttcctgtgatcgcaagaacctctcccttgcctgtacgataggcaagctccacctcgctccataccggaagtcccttttcatagaagctctttaccagcggcaggtctgtgggaactcccggacttagcactacaagatcaagactgtccagcgctctctccggaaaatctccggcccagatctccggggtgtattttccgtttgttttatgtaaaactgcctctttatcaagatttgcgtttccgtcatagatcaccggctgtgctcctgcactcccaagcagatcagctgctccaatgccgctttttccggctccgaaaacgagaactttttttccttttaaatccatttttctgttcctccttataatgccaggagagcgatcaggcacataatagcagttacaacagagaacactgcaacaactcgtgtctcggaccacccacaaagctcaaaatgatggtggataggcgccatcttgaagattctttttccgtgtgttgccttgaaataggatacctggagcataacagacaatacctccacaaggtagatcagtccgaccaggatgataaacagcggcatctgcatggcataagccacaccagccacaaagccacccaatgccagagaaccggtgtctcccataaataccttggcaggatatacattaaacagaaggaatcccatcagactgcccacaactgcacaggtgatcggttccacaccactgttcattccaagggaaaccaccgtaaagaatactgccacgatcagggtaacactggaagccagtccgtcaagtccatccgtaaaattgactccgtttactgtaccgatcaccgcaaagaacagtaccggaaccgcaaaccatcccaggttcagataatgtccgctccagaacgggatcttcatagtcagggatacgttggaataatttacaagataaaaagcaaatacagctgtcacaacgatctgcagtgccattttctgccatggcagaagtccgtcagaacgcttcagaactaccttcagataatcatccagaaatccgatcagtccaaatcccagtgtcaggaaaagtaccgggatgatcatcggataatctctgatataaaacagtgatgttacagttgttgcaatgagaaagatcaccccacccatagtaggggtaccgttctttttcaggtgggactgcacacccagctctctctctgtctgtcccattttaagtcttcttaaaaaagggataacaatcggtcctaatacaaggctgatcgcaaatgagatcagcacagggatcacaacatgaaactccatcctcacacctctaattctttcgtttttttatacttcttcaacagtataaggcttttatcctcattaatcaaccccatctgcccggttttccccgaatggagtttccgtaactgtcctctcgattccaagatagggaagtacattttcaaaaatactgcgtaccaccggtgcggcaatgatcccaccataatacataccctggggtgcatagatgatacaaagagccaggaccttcggatcctctgccggggcaaaccccaggaatgaagaaatatatctgccggagcctctgggcagtgtctgagaggtagctgtttttcccccaatggaaaacccctggatcccggcattttttccggagccttctgaaactacagtttccaggatcgtacgtactgtccgggaagtctcaccggacacgatcccgctttccaccggatattccagtgtccgcacctttgttccgtccgcactttccacgctgatcccaaaatgaggtgtgatccggtttccgccattgatgatcccactgacggttgttgcaagctggatcggtgtgatctgaaacgactggccaaaggataccgtggcaatctccacctctcccatatttttggggttatgcatgatcgttcctgcctctcccggaagatctatccctgtttttttcaaaagtccgaactgtttaaaatatttgtaataacggtctgctccaagccgcaggcccacctcaataaataccgggttgcaggagttctgggcaccttctacaaaactctgcgcaccatgtcctgttctctttgcacagtggatccgccggtcctccaccaccttatagcccggacagaaaaaacgatcctctgttgacaccactccttcctccagccctgctgccatagtgatgatcttaaaagtcgagccaggttcataggtatcattcaggcaggggtttctccacatccggttcagaagatcctgcttcttttctccctctgctgctgtttcttctgtattcagagtaaacggatcgttcagatcaaattcaggcacattgacacaggcatagatttctccgttctgagggttcataagcagtatggaaactctctccgcctgtttttcttccatgactttaccggctgcctgctgcacatattcctggatattaacatccagactggtacgcagagtatttcctgacaccggttccttcctccgttctccggttccgtcgatctccacaccacgtgcatccgtaactgtgaggatcttcccgggctctcctttcaggatctcatcgtatttcacttcaagaccaatgatcccctgattatcacctccggtaaatcccagtacttttgaagcgagagatccataaggataatatctccgataatcctcatctaccttcactccctcaaggtcatattcccggatcctgtctccaatgcttttttccacgtttgtctgtattctttcaatagaagaaattttttcaactttttttcggatttcctcttcttttacagacaatgctccggacagtacacggatcactttttcaggatctttgatctggctgtgtatcaccgatactgtacagactgtccgattatctgccagaatatttcccctgatgtccaggatctttcccctagctgcttttatgtcacgttccctctcatgaagatcctccgccttttttgaataatattctgcccggacgttcataagataccagagtcttcccacaagtcccagaagaagcattatgcagatcagaaaaaccacccatatttttttcctgtgataaaccatggtccggatcataaaaaaatccctctcagaggtcgtcactgtaatatatgacgttcccctgagagggtattctttttatctattccagaccggcttcctcgttggtaaggccttcgctctgcatatcgttattgtcttcggtatcactgtcctccgactcatcttccggcggacttggtacattctcatcggaaatggcctccttctgcccgtctgcgccggttcctgttgcagaatcgctgattcccttaaaaagttcccacagctctgtagtcggaacttctccatcctctgcctcatccggctgtacattcagatacggaagtgcttcggaaaggattccctgtgcaatgtactgtgcgtacgtactgcttgcctgatcatctaccttcggctcatccacaactacatagatcacaagcgccggatcatctaccggtgcaaatccgataaaggataccagatacttgccattgcctcgcggaagcttctcggcagtaccggttttaccaccggagctgtagccctgcaccttggaggtacggctggtaccatggtctacgctggcagccatgtaggagcggatatctgcagatatcttctcggaaatcgtctgcttcatcagtgtcggagagatcgtttttacgattccgccgctgctgtccttgatcttcgtcaccagatgaggctgatagtagtatcctccattgatcacagaacacattgcattgatctcctgtatcatggtcagtgtatagccctgtccgaaagcagagcatgcaagctccgtttctcccatggtatcgctggtatggatcacaccgcttccctcattgggaagatcgataccggttcttgttccgaaattgaaaacgctctgtgtcttaagaaaattatcttttcccatctttgctgcaatctgcatcataccatcgttacaggaattggcaatgacatcggaaagagcttctgtcccgtgagcatccggccataccgcacatttgataaaagtagtcgcaccttccgctccaaaagactgtccgccgtcacagacaaaattatcgctctcggaaatcgctcccatttcaagtgcggagcccataacgatgggctttacaaccgatcccggctcgtaggcatctgtcacgcagaaattactccacattccgttcagcgcttccacggtttcctcatcgttcatggcagcgatctcactctgggaatacacatttgaaagatctctcgggttattcaggtcataacggtcaccgccgtccattgccaggatctctcctgttttcggatcctcgatgatcacgcctacatttttggctcccatcttttcttcaaaggtatttacgtatttttccacaatctgctgaagtcccagatccagcgaggtctcaatgcttttgccatccgtcggttcgatgatcgtctgttctacgtcggaattgttgttgatgtatccgtactgtcttccatccacgccggtaagtgtcgcattgtaatatccttccagtccggcatccgccacatctctggaaagtgtaaatccaacggtatcacaggcagtctcattgaacggataagatctgagataatcttcctcaaaccatacacctgtgatcctggaacgttctttcagctgcgtggcagtcagttcactgtcgtcccccggatcttcgtatttttcgaaggcttttttgtcgtccatggaaatctgtttctttacgatctgatactgacttttttttgtactgctgtcggtgagaagcttccgcatctcatcttcatccaatcccaggacttccacaagagcctttatggtaggctccacggaatcctgatccttattgacctccagacagtcaaggaccacattatagaccttgttgctggttgccaggatattcccgttccggtcatagatatcgcctctttttgccggaagtgtctgattttcatatttctgctgagcctgactcagcacctgctttcgatatttgcttccgctggtggcattgatataggtaattcttgccaccaaaccgactaaagccagcaacactaaggaaaatagtactgccagctttttcttcatactgtaatttattttttttaccggcctgcgccttcttgtactcaatcgatcacctgcttaaaaactgtacttctgttacttgtgtgtgtccacatcctgatactgtctcacataactgtttccttccgtggtataggtctgtatctgatcctccgaaggatatttcattccaagctcgccgatagcttttttcttgatctcgctgatatccactgcagaagtgacctgactgtaatatgcatcgttatcttctttcagctgtgcgagctcagattccagatttgcaacatttttcatactcgccgtgatttcggattttacctgaagataattgatacaggtaaaaagtaccgcgatggaaactgccgtaagaaacagaacgaaccccttgttcatggccattgccttttcccggttccgctgtgcctgtctgcttaccacctgttttgccggtgtcacaggtactgcggatttctgttttcttttctgagccagccgtcgcctttcctgtatctcgggcagatcagtcctctgaggaacttcctgcagccgttttaccgcatttccctgaacatacatttctctgctgttcctgacggtatttcgatttcttctggctgtagtccctcttcctgtcttcgccatttgcctaccttccatctctcaactacattttccgttcaaaaatacgaagcttcgcacttttggatctcggattctcttccatttcctcttttcccggtaagatcggtttccttgtgatcaccttacccttggatttctttccgcatacgcagaccggaaaatccggcgggcaggtacagggattttcattttttcggaaaatggtcttaacgatcctgtcttccagagaatggaatgtaatgatacagatccttcctccgtcatccaggagatcgatcatgccgtccagggaatcccgaagcacgtcaagctcccggttgagctcaatacgtattgcctggaaagtcctcttggccggatgtcctcctgtagcttgtattttcatggggatcgcaccccgtatgatctctgtcagttctccggttgtccggatcggtgcctgctctctggcagccacaatgtgtttcgctatatttttggcaaatttatcttcgccgtaatcgcggataatccgatacagctcccgttcctcataaccgttgactatatcaccggctgtacggctctgtcttctgtccattcgcatgtccagaggagaatcgtaccgataggaaaaacctctctcttcattatccagctgataagatgacactcccaaatccagcaggatcccgtccaccttctcaatgccacgggatctcagctcatctgccatgtaacaataattgctgcgaatgattgtcacctgattaaaggctgacagccgttcactcgcagcaattatcgcatcctggtcttgatctatgccaataaatctccccttggcagaaagtttcttacacacctctgtggcgtgtcccgctcctcctaaagtgccatccacatagattccatccggctttacccttaagccgtcaatggtctcattgagtaatacagatttatgcttaaattccatatccgtctcctgtgggatttctacctgcgttatgctcaaatgacgattcctatgttctgcatgctttccgcaatgctgtccatatcatcataattgcagttctcgctccacttctctttgctccaaacctcaatccggttcagattacccgtaagcaccacatccttatccagaccagcgaactggcgcagcgtctgcggcaccaggattcttccctgcttgtccagctgacatgttgtagctccggctacaaagaaacgtgaaaaggttcttgcgtctttatttgtaagtggtaatgctcggagtttctcttcaaaagcaacccattcatccatcggataaatagaaaggcaaccatccaaccctcttgtcagtacgaactcttcccctaagagttccctgaacctggaagggatgatcagacgccccttcgcgtcgatcgtatgattatactcgcccatgaacatgaaacccacctactctcgtgaaacacgattctccccttcgtgcttccagggtgcaaatggtgtgttctgccactcatccccattcgctaccactattcaccactttctaccacttatgtaatcattctaaactatttaccatgaaaaaacaagtgcatatccaagttttttttcatttcatgaaatatccacaggttttttttcaacctgtttattttctgtgcattattatgaaatgaaaaagcttccggacagtcgccggaagcttttttctgactttatgttctgttattttatgacattttaaaggcctttgaacgcaaaggaaaatttcatctttccattggtatccagaaggtattccggatgggtgcgggcaccccagctgtcatctcctccaacacccatctgcgcctttgcggcacggacaacggtataatggattgccggaagctcatagggatgcatggcattttccatttcatgaggagtatatggaagtgccgagaacatcatcgggccgttttctttatccatctcaaagagcattcctctaccctttctgtctgtgatctttgcccagcgtacttcctctttgtttccgcattcctgcggcacaagatagcgtgccatattgtctgtcacgagattctcataaatgccgagctttgcaccatgcttccggtctgcataagtctctgccggtcccaggccgtaccactgaacatgatcataatccgcattgaatttaaagagtactccgaactccggcatatcgcccagctcttttacaggatcataggtcagcgttgtctttactcttccatctccggttacctcataggcaagacggcattcactggcaggcgtagttggcaggatgtaggtaaaagcaacctccacgctgttttcgtgaaccgttatctccggagcattggccggaccatacatgccttttcggtaatccttatgacttgcgtacatactggcgatcttccactgtgcatagcgcatctgcatcagacttccgcaatcattatctgtaggtgctctccagaagttgggcttcggaatcgcttcgatcatttctcttcctgcatatttatacgaaaccagaccaccattgagaacggaaaacagcacttcgaaattttccccgcggacaccgatgttatgaaggcttctcacaagctccacgccacacgcaggagtttccggtgttccttccacctgataaacatactggccgaaagcaacctcatgtcctgcctctgcccaaagtgttttttctctgagaaggaaggctacggttaccgtatattcgcccgggcgctgctgttttccaaatggaagtctgtaggtctgttggcttaaaggctccaccgctgtatccagtgtctctgtgcggagaacatgaccgttctttgcaagagttacttcacatcggaatgtgtccgtatttacaaaaagatttttgttgatgatcttaacagaatcctcacttacctgcgcagtgatattctggtagttgaattttacctcctgcatctttggtgaagcatctctgtctccgccgtatgcgataccgtttccactaaaattataatctgtaggacgttcaccgaagtctccgccgtatgcctggaattctttaccgtaacggtcttttttgtaaatagactgatcaatgtaatcccagataaagccaccctgatatttcggttctgtatctgtaagatctgtatatttatgcattgcgccgcaggaatttcccattgcatgggtatactcacagcaaataaacggcttgctgtcatcctttgcaaggaactcccggattgcttctacggaaggatacatctggctttccatgtcactggtggcattgtagctgcggtcatggaaaaccccctcataatgtaccagtcttgtaggatcattcttgtggtagaactcagacatctcaaagatatcttttccaccaaaggattcatttccacaggaccagatcaggatcgccgggtggttcttgtcacgctgatacatggaatttacacggtccagcatcatgcccagccattccggtttgttgtgcggaacgatatccgtgtgatctccggtaaattctgctatatcccaggttccgtgagattccagattgttttctgcgatcatgtaaataccatattcatcacagagacggtagatcggagatgcatccggataatgacaggtacggatcgcattgatgttgttctgtttcatggtcacgatgtctttgagcagttcctcccgggacacatgtcttcctgtgacagagctgaactcatggcggttcacacccttgaatacgatacgttttccgttaagggtcatgataccatccttcatttcaaaacggcggaaaccgactttctccgggataatctcctggagctttccgctttcatcactgatctccagctccagatcatagagattcggctcttctgcactccagagaaggggatcctgaatctcccaggtacaggtatcctctccgttcagagatctttcctcctgcaaaaggatctctccctttccggaaagtgtaagcttcatttttccttttccccaggtactggtcacgatctcaagctcggcttttttgagagtttcatccggaatggcacggatcctgagatcatatacatggacatccggtaccgtaaacagataaacatctctgtaaattccggaaaaacggtaaaaatcctgatcctcgcaccagctgctggctgtccatttaaacacctgtgccgccagcttgttctcgccgtccttcagatattccgtaagctcgaattctgacggagtaaaagaatcttcactgtatcccacaaattttccattgagccacagagccaggccactctctgctccctggaatgaaacaaatactctttttcctttcatgctctccggcacatggaaatatctcacatagcttgccaccgggttaaaacgttccgggatctgtcccggatgaagttcttcatggccttcccacggatactggacattggcatactgcggtgcatcatatccttccatctggatatgtgccggcacataaatgtcctcccagtccttacaggaatatgcttcttcctcaaagcctgggatagcagatgcataattccgtgcataatggaacttccagagaccattcagactgtgacggaaagaagttttcccatcttctctctcttcctcacagcgataatatgtatgatctgagtgggcatccattcttccgtcgctgaaataccggggatcttttaacagagaatgatcaaattttttcattttttcctcctgcccggcagattctgttttttctgccggatccttcgttttttatgctatgatcattatagtataatccaccggattatggtataatatgtttcgccaaaatatataacatttagaaacaggtgaatatcatgtcgatctatttcagaaacactccggtcagtgctcccttcatgtttgaatctcttgggaaccactggaatcaggttaatatcttccgtccggacggatatccgtattatcattacctccagactgaaaagggtaccggacgcattgaagtccgtggaaaattttatactctcggagccaacgagggcatcctcatcgcccccggtgtccctcattcctatcacagggagtctacttcctggaccacgatgtttgccaccttcacaggaacactggcaggcagcattccttccatgacagacaaccaggaagtgatccttatcgaaaaggaacagggggccagtatccggaaaatgatttcttctaccttgcgtaaatatcatcagcccacaccggatatgaaatctctttcttccgactgctataattttcttatgaattttacagactgtgcagcttctccgaagatacaggataatcctctctaccagagatatgtgatcccggtaataaaagaaatcgaaaccggttatcagcaggatatcactgcagcgcagctgagccggagcgtttttgtctctccgcagtatctttcccgtctgttccgccgttttatgggctgctcggtttacgagtacgttaccatgtaccgcatcagccgcgcacgtgagcttctgctttccagaccggatatgaagatccaggatgttgccggtgcttccggattttccgatgccagccactttatcgccatgttccgtaaagtcacaggcacaactcctctggatttccgaaagatgtactgatatattcctactgcacagcacaaaaactgccctgccggaaacgtcgtagaagacgttttcctgcagggcagttttctgctgctcttatcagccaaatgccggtatcctatattctgatccatcagacaaaagcatctgtatcctatatctgtttgatctcagtttccgtaatataattccagaatacgatcaactctttggctggcctccagattcttcagaagatcgctcctgctcctgatctggctgtccagcttcttccgttcctcctgcagctgctgcaaaagtgacgctttccgaagagcttcctctttcttctgtatctcgttctgatccatttttttctccctgtacagtctctgtttccagattctctgctacattttcccgttgctgttccgcttctttctctgcttgctgatctttctcgatccttctcatccgtacttttgcccgctttctggacatcacgcgtttcactgcaactaccacggtgcaaagaacaaaaagtattaccgagatcaccagtgaaacatccacgccggttcccggaaacagtattttatctgtgcggaaccactgaagcactgctcttccaagaccatagcctgccagatatctcagaaagatctctccctgaaatacttttttgcgaagcagcatcataagcatcaaaagcacaagcagacaccagagactttcatagaaaaacaagggctgtaccaaaatccaggtaccactgtccacggtttgaagcttttcacgcatagccgtggtgacctctcctgcccgtaccgcagtcagcggcagctgcatggaaaaaatgttgtctgcatattccccgaaagattctctgttaaaaaagcttccccactttcctattatctgcccgatcagaagtcccatgcaggcaagatctgccatctgccagaaggatttctttcggatcctgcagtagaccgcaccacccagcacaccgcccagaagtccgccataaaacataagtcctccggaacgtatattcagaagctgtcccggatcatttttataaaggctccaggaaaaagccgcataaagcagccttgcccctgccacaccagaaagcagcgttatgatggccagatccagatatgcatccggatcttcatgatttcttctggcttccagtgccacaaaaaagattcccagaagcattcctatcgcgatcagtacgccatagatcgtgatctcaaagccaaagatctcaaaggatctcggcacatgatccaaaaccagatttaatccgggaaaccgaattgacatatccataaaatcacctgttataatttttcagcttacagccggtatttcacagacgttggtgatcacacgttaaatctgaataagatcacatctccgtcctgtacaacgtactcttttccttccatacgtacaaggcccttctctctggcacctgcataggaaccgcaatccagaagatcctgataattcacaacctctgctttgataaatccacgttcaaagtctgtgtggatcttacctgctgcctgcggtgccttggttccgatcttgatggtccatgctcttgtctcatcctctccggctgtcaggaagctcataaggccaagaaggtgatagcttgcgcgcaccagcttctcaaggccggattctgtcagtcccagatcctcaaggaacatctttctctcatcctcatccagctcggagatttcctcctcgatctgcgcacagatcacaaatacctcgctgttctgtttggcagcgtattcacgtactgcctgtacatactgattgttcgccccatcatctgcgatatcatcctctgcaacgttagccgcatagatcaccggttttgcagtaagaagattataggttgcaagccatgcatcctcatcttcgttctctgtttccagagtaatggcaagctgtccctcttccagatgcgcctttactttttcaaggaatgtaagctctttggcagcttccttatccatacgtgcagtcttggtaaccttggcaatccttctctcgaggatctcaagatcagagaaaacaagctccagattaatagtctcgatatcgcggagcggatcaatgcttccatctacatgaacaacattggaatcctcaaagcagcgtaccacgtgaacgatagcatctacctcacggatatttgcaaggaactggtttccaagtccctctcccttagatgcgccttttacaagacctgcaatatcgacgaattcgatcactgccggtgttactttttttgatttataaaaatctccgagaagattcagtctctcatccggaacggttacaacacccacattggggtcgatagtacagaacggatagtttgcggattctgctccggcttttgtcagtgaattgaataatgtactttttcctacgttaggaagacctacgattcctaatttcattttctctatttcctcctgtaaatcctttgatttcaagggatttcagcatacttacttttgcaagtgggccatttagtgggccattacattgccataagcgcttctgctaccaagtccatttcttttttcttttcttcctcggtagtatgaacatataagttcattgtaattccaatattcgaatggcccagtaacatctgaagtgttttcggtttcattcctgcttcaatacatctggtagcaaaagtatgtctcaagatatgcatcgaaaatcttgaaatttttgctttatcacagattttaaacagcgctgtatcatatgtactgttcttaaccggtgttccttttcgacacagaaacacaaattctttccattctgttgaaatttctgaaatcctcttattcttttctttttgtttttttagtatagcaaccgcttcttctgttaagggtatcgtacggtagcctgatttactctttggttctccgatacgccactcctttgcactataacgatattccatacttctgcgaatctgaattgttttggatttaaaatcgacatcttcccatttcaatcctaccaattcgcctgttcgcaatccggtttgtagtataaaacgatactgattttcatagctttgaccttctgcgtattgtaaaaatattttttgtatgtctcttgttaaagcaatcttcttctcagatggctttcccatatcacttttcacagattttttgcagggattgctacacaggacttcattttcttttgcatactcaaacatgttgtataatgcaattcttgcctgataaattgtagatgtacgatactcctgatctgccatatcataaaatattttctgacagtgaagtggtttcacgtctgatagtgtcatcttcccaattaccggtttaatatttttaatatatctctccgtataattgcgaacagtatttgaacggactgttttcttttttatcccaatccaataatcaaaccattgatcgaccagcatatctgatggcattgaaatatcactgtgttcatccacataagtcgcatcagcaatccatgctctgcactcttgcagctttttgaatcgtttatgttttctctttccaaaccgatctacaaatctggctgagtataatcccgtactttcttgggttattcctttgccaagttctttgccttttaaatcttttcccatatttcagctcctctcataagaagccctaatacagtaccttgtattataccatagcatcttatttttgtgaatattcattttcatctcatcttctgtcattcatttatatttccacactttccgaaatgaatttttcaaattcttttctctttacaagttttttcgtacctacgtaaagcacaaacggacatctcggttctttcaaaagactacttattctattttgtccgatattactgtattctgctgcctcttcaattgtaagagccactttttcacatattgcaacatattgtttgttcataaaatcctttccttattgtttaacgtgcgtagcattcacttctatccgcaatacacacgatcattctttgtattcaacaacgttttcgctttctccattttcatacttgcaattgcttctcgtttacttgtgcctccaacatacattggtgtacacatttctaaaatacggtcatagatacgtcttttctctaacatggtctcgctttttatttctttcagcggaagattggtcgtgatgatcaatggtcgtcctgaacggatcctgcgatctatgacgctaaaaataattcctaacgcatattctgaatttcgttccactccaagatcatcaataatcaaaagctggtaagaagccaatgcattgatatattccattttgtctgccagtggaaatatatcatcgataatggtattgaaatttgtcatctttaccgttacttctcgtttgagaagatcattggcaatacacccggcaatataacttttcccggtaccaaccggtccccaaaacaaacaaccaatatgatttcttttcatttcatcccagttatcaacatagcttttggccttatgcattaccgcatctgacatatctgcattttcaaatgtccactcttccattctgctctcgtcaaaacagatgctcgtatttctgctgactaattcccggtgctctttgtctttaaaatatttttgttcttcttcatatgcttttctgtcacaggcacattgcctggaatgttttttcatccccataaaactacccttagggaaaaaagcttctttcgcttccccacagactttgcaatatcgcaaaccatcactgcctacacatacgggatcttcttctctcatcacaaactctctccctccccatagcaataatttacttcatgatatttattacttttatatttctcagttactttactaggtgccacatttccggcttctgcacagccatttttatgaccagatgatgggtgcttttccggctctattacagccatcttttcaaccgccttatcatcaaccggctgtaaacctatctcatcagatggaattttcacatataaatgattaggttttgaaaatccaccggatctgcgaaccaatagtcccacatcatctaattccttcaacgctgtttttacagaagatttgcatttatcgatttgaacagacaattcttctattggaaatatcaaataaacatttccatacttgtctatccagctattctttctcgatatccgcgcccggtcatacaaaatcatataaagaaattttgcattttgagaaatgcgcagtttcagcaaaaacttcggaaactggaagtactgaagcatctgctcagactccttcatgtattcatatttcattcttttctcgcctcgtttctgtttctaattgttgtaaaaatcatttttatgccggctaaaaaatgttcttacacatatacaaaagatgaagggcataaatacagcctcttaatgaaaaatttttatttttcctgcaaaaaataccctttcattaatacgaaatgctgagagacatttttacagccccctgaggaaatttttttatttttttcggttaatcgaatacttttaaaaaaaaacactcacctattcacaggtgaatgccttatcaaaatttccttattttgttgtctgtgacgcttgctcagaaacgcttgcgtatctgctaaaatgtaattgcctgcaattatattttcacgtgggtatggggacgtaatccccatcaagtccgctactcgtaagtaatacaaaattgtcaaaatgacaatactgtaatacacgggtggatcttgctctggttgtaacacatgaattcatacaataataggcccaaatgggcactttcaccattcgagcctatatattatatgtctttgggataatagcttaaaaagtaactgtctagaccactttttaaactgtccactatctagggtacagtttattttcaaccatactattttttattctttggctttattccccagaataccacattcatgagtattacgatcaacagcacaacagccattgatacccagaatcccatattgagtccgagccattcacaagttccaaaaagtgtcatccataattctttccaattcattctttctacctcctagagcagttcgccataatagcggacatatgcttttttcaagcttgttgccagcatcatgtacagcagaatacatgggatcagatatgcaaaatatgatgccggtaaagcaacaagaccaagtgcagctccaaatggtgtgaacggaatcacagtcagaactgcaatacctgtcatggtaagcaatgttaccggtgctgatgcacggctctggataaacggaagctttggtgtgcgaatcatgtgaatgactaatgtctggctccacatagattccacaaaccatccagcctggaacattccgatataacgtgcctgcatagtagcaagctctacaccgctgtaatgggctgccagatcattgaataaaatgccttttgatacaaataacgggcagaatacaaagtacatgaatatataagttgtaaaatcaaaaatcgaacttgtaggtccaatccagatcataaagctacccacactggaagcatcccatttacgtggttttgcaataaactcttcgtctacgttatcccatggaattgctgtacaggacagatcatagatcagattcaggaaaatcagatgtacactcatcatcgggaggaaaggtaacagtgccgaagcagctaatacagagaacatatttccaaagttagatgaggccgtcatcttgatatatttgatcatattagcataagttttacgtccttctatgattccttcttccagaaccatcagatctttttccagcaggatgatatctgcggattcttttgccacatctactgcagtatctacagagattccaatatcggcagctttcattgcagcggcatcgttgattccatcacccatgaatcctacggtatgaccgttttctctgagaactgaaaccacgcgtgctttctgatccggtgtaagctttgcaaatacctctgttgtctctactgcttttgcaagctggccatctgtcatatgatccagatcagaacccagaagcatgttgcgtacttcaagtcctacctgcttgcagattgtacgtgttaccttatcattatcacctgtcaaaatctttgttattacgccgtgtgctttcaatgcccgaattgcatctgcagtagactcctttggtggatcaagaaatgccagatatccaattagtaccatctcacactcatcttttataccaaatgcacccaccggagaaggattgcttttttgtgcaatggcaagcacacggaatcctttgtcattcagttcgtctactgttttcagaatacgcccacgaacctcttctgtaagtggctgcacagtaccatcgcactcagcaaaagaacagatggagagcatttcttctacagctccctttgttaccatctgtgtctttccctttttatcctgtactaccgtagtcagacgacgacgtgtaaaatcaaatggaatctcatctaccttcacataattttcagacaaatcgaggagctttggatctgccgcctcttcttcctctgttctgtgaatgatcgccagatccatcaggttcttataaccggtctggaagtagctgtttaagtatgcatggcgcagtactcttgtatcatcttctccattcacattcaggtgatattccaacacaaccttatcctgtgtcagtgttcctgttttatctgtacagagaatgtcaatggcaccgaaattctggatagaattcagattcttaacaatcgtctgctttttactcatggaaacggcaccttttgcaagacaggttgttacgatcatcggcagcatctccggagtcagtccgacagccacggaaataccgaacagaaaggcatccagccagtctccctttgtgataccattgataaaaaataccagcggaaccatgaccagcataaaccggatcagaacccatgacactgcattcacgcctttggtaaagcttgtctccactgcttcacctgcaatcgcagatgccatggaaccaaacaaagtgcggtctcccgtgcagacaaccactgccgttgcacttccggaaattacattgcttcccataaaagcaatattgctgtaatcggtgatgctttctttctgtgcacataccttcggtgtcttttccaccggttcgctttcacctgttaagcttgcctgactgataaataagtctttggcatccagaatacggacatctgctgggatcatgtctcctgctgaaagatgtacgatatctcctacaaccagatcgtccataggaatctcaattttttcctgttctcttcttgtgacggtgcaagtagttgtgatcatggataacagtttttctgctgcatttccacttctggattcctgtacaaaacgaagcgtaccggagatcataaccatggtcagaataatcaccactgttaatggatcaaaatcttccggtgaacttcctaacagagaaaaatatggaaaaaccatatctgtcatagtagaaacaactgccagacagaaaaggattgctgtaaatggattgataaatgctccagccagacgtttcgcaagggattgtttcttctcatgcgttactttattcgttccatattttgtccgacttaccactatattttcagcatccagtccacgaagtgttgtgtgcagactcttcaaaacctccttaatcggattggtagccgcatgttcgatgcggtggttctgctcgtcacggatcacagcttgctgtgctgcctgccgaacagccatacgattttctttcttattcattggtctttacctccttgttttgcaattattttttataatatcgatcacttttctcgatataccaaagatcaaatcccgccacaataaaccatgcaaccatagcagtcacaaaccagtgattttcaaagcctgtccatagaccttttagcagaaaaatcaatccatttaatgcaatgacttcaccgatgttacgacaaagcggcacaattttaatcttctctttctcttcctgcggcatgtttttccaagaagagaaatgaatatggccttttccacatgcaaacataaaaccggcaatcgtgaaaatgataccaaaaaagatacaggttaaattcatggttttcttctcctttcattgattcctctcgttatgagcttatttattttctgaagcctgataagcaatttcaccatcgtaactgctaaaaaaatccaaacaaccacagatatttgataccagacctgtatcaccaaaatttggtgagccggaaatataagactcacacaactgcatgctgcagtgaataaaatataaagaatgaaaaaaattatccatctttcacttttgatttttttcaactacaacacctcccaacctgcactgattacttccggaagttccaatgcctgaccaacaataccttccagaacattgcttttcggttttcccgcagaacaatacttcgctatgatctcgactttatcccccacaacatctccactttccagatgattcagatacaaggtcttactggaattgctagtgatcagtaaaagtcttatttcctgttctgcatcttcctgacaaagtactgtgatgcagtattctttttcagattcatctcctacagcaatcggattaagttttcttgcaagcggacgcagaatcagatttgaaccaatcaaaatgcctgctgcagaaactgccattataaacattcctgtgctggcaagaataccaattgccgctgtacaccaaagtgttgctgctgtattcattcctcttaccgtaccgctgtctttaaagatcacaccactgcataggaatccaacaccggagataatgctgcttcctacacgaaacacctgatcggaaccataaagcattggaaataaagtaaaaaaactggttcccatacagatcagaacatttatccgtattccagctggatgcccggtcaactgcctttccaatccgataaaaaatccaagcaacacggataaagaaattcttaaaacaaaatctgtgtataccatacataccgcctcccttcgacctcttacagaatacaaaaaaagcaaggagaatcacatgaccaaaatcttgcgatttccttgcgatttagcaagaactatgagaaacacactccgcgagtttctcatagttatcgcgacagtcgccaaggcctcgtgcaagcacggactttggctcgttgttcgcgtaaattacaaaaaatttggcggactgctttcagcccgcctgttttacaccttatcattaaatttatatccgatcccccaaatcgtaagtataaactttggttcatccggattcggttcaatcttctttcgcaattttcgaataaatgccatgatattactgtcatctaaaagataattttcagaccatactgccttatagatctgctcttttgtaaatacttctcctctgttttccgccagaaaatacaggatatcaaactccttaggagtcagggaaaccgcttggcccattctagtaacgctcctgcttttcggattgattactaattccccaattttcatctcatccgaaagattgagagatgcaatttctgaattatttgcagtgctgagcagtaatgaatttatctcgccactcaccatatcatagataccagaaagcagttctttcgcactgtcactttctggtggttctttgatcagcttttgaaggagccattcctgcaggacagaatccatggaaataacactgatattctttttcatgatggtttccctcctttcagatcagcccatgatatttcttctgataaacagttttgaccaccgtagtcagaagcatatagagtaagactacaacaaataaaaacaggaaatacatgattggcaatttcgtcaatccaataacacctgcgcttttggtaaaagtaagtgaagtaaagacaataattcctgcaaaggtcgtacaaacaaccggaatggaaggactgctctgcacaaatggtatcttccttgtccgaagaaaatgaaggatcaaaacctgcgtccacatcgattctaaaaaccatcctgtctgaaacaaagcaacatactgcgactgcatcactggatctaccatgttcagatacgttgtatcgccacacaataatggacagagaatataatacaaaaacagaaatgtcacgatatcaaatatcgaactaataggaccaaaaaataacataaatcgtcccagcgtctttccggaccagtctcttggcgagagtgtttcttcctcatccacattatcccatggaaggatgatacataaaacatcatacagcagattcaataataaaatctgcagagatgtcattggcaaaaatggtaagaatgcactggcacatacaacagaaaaaatattgccaaaattagaacttgccgtaatcttaatgtatttgagcatgtttgtaaatgttttacgcccttccagaatcccctgctctaatacacctaaatccttttgaagcaatacgacatccgctgcatctttcgctgcatctaccgctgtatctactgaaataccaacattcgattcacaaaaagccgggatatcattgattccatctcccaagaaacctactgtatgtccattttgccttaaagcagaaacaatacggactttctgccctggtgttaattctgcaaatacatgaatatcttctactgttttgccgagttcatcgtccgtcatctgatccaaatctgcaccagtcaatatgatttctgacgggattttgacccttcggcaaatagatgctgccacatcagcctgatcacctgtcagtattttcggtgttacctgcagtcttttcagagcctccacagatgtctttgctgtctttttcggtgcatcaaagaatgcaagatatcccatcaggatcatattgttttcgtctgtcggtatgatctgatcctgtttctcaatctttttccgtgcaacagcaatcactttcattccatcctgcagcatctcatccactacagaagcaacactctgcatcccgtttttttccatcggtaggatttcgccacgaaattccacatgactgcaccgagacacaatctgggaaatattacccttcataataagctggcaatctccatttttatctgtcaccagtgtactaacaaatttgcgggaataatcaaatggaatttcatcctctttctgataccgcataagaagatcagaaaaatgctgttcatgcccaggcatcgtctggcaggcaagaattgcattatcaattggattacatacaccggaatggaaagcactatttaaaaaagcaaaatccaatacctgcccactttcgtttcccagcacatccatatagtattccaataggatactttcattggtcagtgttcctgttttatccatgcagagcacatccatgctaccaaatccttgcattgcattaatgtctttaatgattgtctgctttttactcatactcaggctgccccttgcaaggcaggctgtgatcaccatcggcagcatttccggcatcaagccaacggcaacagacagtgcaaaggcaaaagattccagccaccttccacctgtgatctgcaatagtatgaatacaataggaatcaatactgcaataaaacgaagcatgacccaggcaatagagttggctcctttttgaaaagactgtttttcatctggatcttctttcgtaaaactaccatatagtgtgtcttttccgactgcaagcacaataccctcaccttttccactgatgacagttgttgccataaatgcaagattttcaagttgcgtcaaggattccgaattactgtaactcaatgcctgtgcatttttttccaggatcgcactttcgcctgtgatcgctgcctgggagagaaagagatcacttactttggtgagtctcagatcagccggaacacgatcacctgccacaagcagaacaatatctccaaccaccagttcctcagctggaatctctttcacttctcccgcacgccgtacggtaatgctttcatgtatcagccggtttagctgttttgatgcattctttgcacgaagttcctgaaccaaacggattgttccgctaatcaaaatcattgaaaaaatgataatcgcagtcgttgcatttctggcaaaattcgatacaagaaccacatctgtagccagtgaaatgattccaagaactaaaagaatgatattaaatggattgatgaaggcacgccgcagtagtcgtaacatggtatcatttcttctttgcgagaaactatttacaccatacttctctctcatcaattcaacctgtgattgtgacaggccttcccctgatatctctaattcctgatatatttgtgatacttctcgataagcatatttcttaatacaacaatcgatcagtgtagttttaggcatatagacttgcctcctttctcaataccgatatatttattttaacattatcttaaaaaaactccatgcttagattcttgcttttttcttgcgattacattgataatttacttctacaccgcacctctttaaaaccaataaactcaaggcctttgttccgtcccttaaacactgccgtgacaattaaaagcaaagcataatacaacaacgttctgttcgatactagaaatatatcatcagcatacagtttgagcggaaaaagtctcatggtcatgagcgaaaatgaaagcaaaatttattagatggtacaacatactatgcctttaaaattccagttacatattcatattggaacctaatcatctgttatttttattataatacttgaaaaaaaagaagcactcatacaagcgcttcttcttaccatattaggacttcgaccaaaagttagtgggccacaaagtgggccatttttcaaaaaattacatgaatttatatagagttttatccaagtcgaaaatccgctaaatgctctagctatcagcatttaaaggcatttaacaacttatatggacatttatgaaacctgtctcgtaataacgattcctaatttcatctctctatatacgtcctttcaatatatttatttacagtatttttcagatactatttaaacaggcctttccgtttttcaggccattcctgtcccatattaccatacacagcctgaaatcgcaactgtgaggcatttattgttactgtcagtccctggacatgatcatcagaagctgcccgctttcatacaggatctctgcggtttcttccgaaatctcattgctgacggtcaggccactgtcttctactgtcagatgatatccgttcagcggatacttaaatcccctcagagtgaggcctgtcacatcacctcccacagtaaagaatgaaacatattttccaaactgctcctctctgtgcaggatggttccgctttctgcaagtgtgatataattccactgatctgcgatcgcaatacgaacgccctgttccttacccatggaaagcagtcccagattcgccagcacatgatccagccttgtgccggtagctcccaggatcaggatatcctttgcacccttgcggatcatctggtttaccgcagactgtgtatccgaatcatccttctctggcttcagcctgatgatctccggtcccttcaggctttccatatatttttggccttcttcggaaagactgtcaaaatccccaattgcaagatccggaataaattcccggtttttcataaaccattccatccccttatctgcagcaacaagagtaattttctctcctcggctttcttctattcttttttttaaaaaatcgagggcaaaaccattctggatattgcccccgctgattattattgtatcgatcattttcagtccagctcttttttgatattgtggattttttctgtaatgtgtcttacattggctgccacatcgcccttaaatacccaggaacctgcgaccatgaggtttgcaccggcacgcataacagtctccagtgtatcatcattgatacccccatctacctggatatcaacatccagctcttcttcatcaataagctcacgaagctcctggatcttctccgtgcattcgtccatgtatttctgtccgccaaatcctggctgaacagtcattatcagcaccatatccacatcttcaagaagatggctgatgtcatttaccggtgtggatggcttgattgaaactgccgcctttacccctgctgccctgatctgctccagtgtacgctccagatcctcacatgcctccgcatgtacagtaatggaatctgctccgcattctacaaaatcgcggatatatctttccggttctgttaccatcaaatgtacgtcgaaaaacatgttggattctttccggatcgatttgatcaccggcattccaaaagaaatgctgggaacaaaatctccatccataacatcaatatgcagatattcaacgccttccttttccagaattttgatctgttctcccagtctgttaaaatctgctgataagatcgatgggcacaatcggtattccatgactcagtatctccttttctcttttaattcctggtgcagctccagataatcttcatatcggagtctgctgatctcattgttctcaagggcttccttaacagcgcagcccggttcatgtatgtgacggcacccctgaaagcggcactgtccttcatatcttcggaactccggaaagtaatccttcagttcctgctcctccatattttcaatatataaggaggaaaatcccggcgtatccacaaggaatgtatcctgtgccaccggtatgatctgtgcatggcgcgtggtatgttttccccgtttcagcttacggctgatctcaccggtttccatctccacttcttcctgaagggaatttgtaagagaagattttcccacgccggatgggccggcaaccacagttgtcctgccctgaagcacttcttcgatctcgtcgagtccttctcccttcagggcacttgacaggatcacctgatagccgcagctctggtatgtttcatagagaaattccaactcttccgttgttgccagatcttttttgttaaaacagatgactgccggaacaccttccctctccatcataatgaggaaacgatccagaagcatgaagttcggcttcggattatccatggcaaagatcaccagtgcctgatctacattggccacagccggacggatcaaagaattcttacgcttgtggatctccgtcacacttccctccagttccttttcatccagaactgtaatgtccacattgtcacctaccagaggcttgaatttatccttacggaaaattcccttggctctgcattcatatgtattaccgtcttctgcatatacgtagtagaatccggcaatacctttgattatctttccctgcatgatcactcagctttcttgaatgtaaccgtgtaggttccaagctgctgataatccccgtctacctcttcatagagatagatggttcctgaggtaacgccctcagcacctgagatatcaagctgatacgggaagctgatattctgtccatcaatgatggtggatgccttaggctcaccgtttacgtcctggatcagttccagacggatcgcgcctccattgtagccggacggggtatccagtgtctgtgtacatttccagcctgtgtttgcattaacatccgctgtagatgtagttgtagatactgtgctgtccgcagatgctgtgctgtccgcagatgctgtgctgtctgtagatgctgtactatctgcagatgctgcgctgtctgtggatggagccttgtcaccggagctgatggtaatgctgatcggctgatccgggtccgctgccgcataggcttccggatcctgtgcgataactgtacctgcagcttctgtactctgctgttctgttatctggatatcaataaatttacctaaagtagtaagtgcatcatccttggtcattcccacaacactcgggacctcagcattatcgccataatcaacccctcggctgactgtcagtgtcacagaagagcctgcctgcacagaagtacctgctgccggctcgacattgtaaacatatcccggatctaccaatgcatatccgttgtcatctgtgtcgctgtattctttctggacatttacctgaagtccaagatcttccagagtctgctgtgcatcgattcctgtgcgtccatccagatccgggatcgtaacctgtgctgttccggtgcttacccagtatttcacagttgtattggcttcaacctgtgttcccgcagctgtctcctgacgggagatcctgcctttttcctgatcggatgcctcctcaccggccatctggacacccagatgtgcatcgtttgcaagtgttttagcctcttcctctgtcttgcctacaagatcaggaacagttgccagaccgtcagctgctgattcctgcttcgcttctgccttgctgctgtctgcagctccgctgctgccggttccaaacagtcctgcggcacgtccaagcactaccacaagaacgatcagaaggactgcacctccgatcagtgccgcaatcgtcaggcctcttccggaaccatgatgcttctttttctttccggatctatgctcggatctcggtctgtattcttcctctgcatcatcgtaatcgttatcatcgtatttttcttcctcaagtgcggtgatctccggttttgtgatctgcttcggtgtatgtttgatctcaccaagctcttcttctgagatcacaaccgtcttggcatcgttgtcaactgtagtaagccttacaaaatcaccctggggatcgatcagagaatgcttcaggtctgcgatcacatcctccatacggctgtaacgacgatctacacttttctgtgtacatttcagaatgatctgctccagactgtacggaaggtccggtgtatacacacttggcgggaccatctcttcctgcagatgcttgatagcgatcgccacagtggtatctccgtcaaaaggaactcttcctgtgaccatctcatacagtgtgattccaagagaatagatatcgctcttctcatcgctgtatccgcctctcacctgctcaggtgagctgtaatgtacagatcccattacattggagctgatcgtattggaagatgcagctctggcaattccaaagtctgtcacctttactttaccatctgtagagataatgatattctggggtttcacatctctgtgaacgataccatggctgtgtgccgcctccagacccatagaaacctggattgcgatacttgtggcctctttaatggaaagctttcccttcttggagatgtattccttcagagtgataccctcaataagttccataacaatgtaataaacaccaccgtcatctcctacatcaaatacattgacgatattcggatgtgtaagaccagctgccgcctgggcctcacttctgaatttctttataaacgtggtgtcttcccgaaactccggtttcaggaccttcacggcaacaaaacggttcagcttatggtccatagccttatagacatctgccattccgccagttccgatttttcctacgatctcatagcgctcggctatgatcattcccgtcttcaacatgcttccacctcattcgtgaatggctctaccagtacgactgcaatattatccttaccaccattctgatttgcttcccgaaggagcgcactgcccttctgatcaatatctgcttccggatcggatatgatctcctggatcttctcatcttcaaccatattgctgagaccgtctgaacacatcaggatcgtacatcctttttcaagtttcagatcaaagaaatccacatccaccgttttctctgcgccaagtgcccttgtaatgatgttcttatccggatgattccgtgcttccgcttcgctgatctcgcccattctcaccatttcctgtaccagggaatgatctctggtgacctggcggatcccgtcctggatcacatataaacggctgtcacccacattggctacataggcatactgatctacaatagtcgccaccaccatagtggttcccatgccccggaggttttcatcttcctgcgcacggtttctgatctccgtgttcgcagcttcgatcgcatgacgaataaccttcacaggattgtaatccgcatcttcacggatttcatccacaaggatccgtactgcatgtgaggatgcatagtcaccggcgttatgtccgcccattccgtccgcgactgtgaaaagattaggcagatttccaaccggaccttcagatgcaaacacgtaatcctgattcatcttccgcttctgccctacatcagtagctgagtatatcctcatgtcacttctcgctttctgttttttccatgtaactttttcttagctgtccacaggcaccgtcgatatcgctgcccatttcccttctaatagtaacattaattccgtatttttcaagttttattttgaaattctccacagcctgtcgagtagacctcacataggagcgttccttgatgggattgaccggaatcagatttacatggcaattgatgccttttatacggcctgccagctgtctcgcatcttcttcactgtcgttgacgccagctacaagactgtactcaaaggtgatccttcggcctgttttgtcaaaataatttctgcaggcatccagaacctcatccatggaatacttattcgcgatcggcatcagttcctgtcgtttttcatcatttggagcatgaagggaaagtgccagagtgatctgaagcttttcttcagccagatcatacatcttcggcacgatcccacaggtagaaaccgtcacatttctctgactgatcccaagaccgttttcgtcggtaaggatccggacaaaacggacaagattgtcataattatccatcggctcaccggttcccatcacaactacattggccacacgttcgccggtatctgcctggatacggtaaatctgatccagcatctcggacggtttcaggcatctggtcagtcctccgatggtagatgcacagaatctgcatcccatacggcagcccacctgagaagaaatgcacacagaatttccgtggtgataccgcatgagaacactctcgatcacatttccatcttccagctggaacagatattttctggttccgtcaatttttgagatccttacatctgcctgggtcagtgctgtgatcggataagccgaaagcttttccctgaggcttttggaaagatttgtcatttcatcccaggaggtaaccagctgctggtggagccatgcatagatctgtttcgcccggaaaggcttttcaccgatctttgtcatgaattccttcaattcctccatggtcatggattttacatctgtcattttctgttatttccttctgaatctggcaataaagaatccatctgtcttatgtattcccggcagaagctgcagatagccaagcttcgtggatttacagtgcagttcctccggaatatacggatccaggctttccagccggtacggataattctttaaaaaccataatacattttcttcgttttcttcccgggcaatggtacatgtgctgaagatcagcgttccatccggtttcacatactttgcagccttatccaggatcattctctggagcattacgatctcttcctgtttctgcggagttgcccggtatttgatttccggtttcttgccgataactccataaccggagcacggtacatccgcgatcacaatatccgcagcctgttcggaatccggatcatataccgttgcatcctgaactctggcttccacattgatcactccggtcctgtggatgttttctttgataagatctgccttatactgacttacatctctggcatccacatttccgtaatcccccattttgtctgccgcatggatgctttttccacctggtgcagcgcacatgtcgatgatatggtcaccttttttcggacttgcagcttccgctacaagcatagagcttacatcctgcaccaggatctttccctgaaggaaggtctcaagtgtcaaaatatgattgtaatcggaaatcttcagtgcatagggaagataaggagcctgttctactgtcactccctgagacttcaaactggtgacgatctctctcagagacgccttatgagtacggcaccgtactgtgatcggtctttctgtcagaaaatcctccaggatcttctccgtagtcttcactccgtaggctgctttccatttttctaccagatattccggcatggaatatttcacagaaagataacggacttcgttttcttccctggaaggaagctccagatcaccgatctctcttgcgatcgtacggagcaccccgttgacaaagggctttagattataaaagccttttcgctgtgccagctttaccgcttcattgcatactgcactgtccggaacactgtccataaatttcagctgatataccgcacttctcaggatctcacggatctgcggtttcatcttgtttacagaaaccttggaaaaagaatcgatgacataatcaatatagatcctgtattccagggttccctcacatactcttgtaataaagctacgttcctgtttcggaagaaactgatatttggaaagcgcattccggatcgcaatatggctgtgctcaccctcctcctcgatctgtaacaggatctcaaggatcagttctctggtatttactccgctgctaatcacgatctctacctcctgcaaggataatcagtctcagaagctgcagaatagatgccgccagagctgctacataggtaagcgctgccgctgtaagtacttttcttgcaccctttttttcatctgcacctaagatacctgtactttccagcattttaagcgctctggaagacgcattgatctcaaccggaagtgtcaccagctgaaacagtactgccagtgaaaacaaaacaattcccagagttaccagcggatcaatggaaaagatcagtcctgcgataaacagcggccatgaaagctgggaaccaatatttgcagcaggtacaatggctgaacggatattcagtggtgcataattgatcgcatcctggatcgcatggccacattcatgtgctgccacccccacagccgccagagaatttcttccataaatatcttctgaaagggaaaccgttttcgttctcggatcatagtgatccgtaagacttccgcggatcggaaccacctgtacgtctgtgatcccagccgctctcaggatcctctgtgcagcttccgcaccggtgatacctgaatgactccggacctttttatagactgcaaaggtactgcgcagcttcgcggatgccgcaagagaaagaagcattccgatcacgagcaaaagaatcgtggggtccattccccatccgtaataaccatatccgtacataactcatcactccctggaatctctgaacatgtctcctggtttcaactgatatccccgaaggaacgcatccacttccatgcgttttttgccttccagctgcacttcatggagcacgagtaccttctggccgcatgctacctggattcctcctttgtcagcggctatcacagttcccggtgcttcctgtgcctgtttttccagaacagagctcttccagaccttcaatgtttttccattgataaaggtaaaagcgcttggccatggatcaaggcctcttaccagacgctccagttcttccgcatttttgctgaaatccagaagccccatttttttggagatcatggcagcatatggtgttggactctcctccggctgtttctcgcggattgcagttccgtcaaaaatggacggtaaagtctgtaccagaagctctgcacctgcctgtgcgagcttatcaaacaagcttccacctgtctcatctttggcaagcggaaccacgatcctggaaatcatatcaccggtatccagaccggttcccatctgcataatggtaacgccggattctttttcaccgtcgatcaccgcctgctggatcggtgcagctccacgatatttaggaagcagagacgcatggatattgatacatccgaatctcggcatatccaggatgctctttggaatgatctgcccgaatgccgcaacaatgatgatgtccggtgcaagatttttcagttcttccacaaattcaggatctcttaccttcaccggctgcagtaccgggatcccgtgtttcagtgcttcttcttttacaggagtaggcatcatagttttgcctctgcccttcggtttgtccggctgtgtaatcacagcctccacttcatatccgttctctgccagtgctgcaagaggcgccaccgcaaagtccggagttcccatataaataatcttcatagtatcccgcctttagtcttcttcatcataagttaccttgtgaagttctccctccacaagttctgtatacatttttccatccagatggtcaatctcatgacagaacgctcttgccagaaggccctctccctcgtagatctgttcgttcatatttacatcaagtgcttttaccttcacatagttcggacgtgttacctgtcctgccattcccggaacgctcaggcatccctcgtcaccggtctgctcgccgcttgtctcaaggatctccggattgatcagcacgatcgggccctcacctacatcgatgacaacgatacgtttcagtattcctacctgtggtgcagcgaggccaacacccattgcatcatacatggtatccagcatatctgtgatcagttccccgatcctcggtgtcattttgtctactgtccgggatttttttgtcagtacagaatccccctgtacacggattgttctaagtgccatttttcttctcctttaattcatatcaaattgaatgtatattttccggaatccggaatttatctctatatatttctccagcttctctctgactgctgtgagaaagcagatatccctgtgcttcagatggatcacctgacgataaacatcctttaccttacctaccgatgcagctgcaggtccgatcatgtgaagctcttccttcggacttaccctgcggataaaaacttctatataatacatggcatttttcagaagttcttcatcctgacaggcgccaaaaacagtcatcatatgggctgccggcggatagtccagaagcatccgataccccatttcttctttataaaatttcttataatcctgaacagctgcagcctggatactgtaatgctccggctgatatgtctggatcaccgcctgccccggccgattccctctgccggaacgtccaactgcctgagtcagaagctggaatgtacgctccccgcagtgatagtcatccatattcagcgaaagatctgctgcaatcactcctaccagagtcacattcggaaaatcatgtcccttgacgatcatctgggtccccaccagaatatctgcctcatgctttgcaaaagaagccaggatcttctcatagctgtccttggtccttgtggtatcaaaatccattcgaagtaccctggctttcgggaattctttttcaatgaccttctcgatctgctgggttcctgccttaaatccaccaatgtgcggtgaaccacaggacggacagatttccggtttcacagtctcatagccgcaataatgacagatcagacgattgccattgtgttcacttagagatacatcacagtggggacatttcataacgtgaccgcaggctctgcaggaaacaaagcccgcatatcctctccggttcagaaacagcatggcctgttctcttctttcaaggacctgctccagatccctcttcagctccagactcagtaccgagcggtttcctttctttaattcttcccgaagatccacgattgatacctgtggaagaggcctttcctcataacgtgcgtttaactttaccagaagatattctccgtcacaggcatgactgtaggcttccaatgacggagtggctgatcccatgaccacacgggcatgttccattcgtgccctctcaatggcagtctcacgtgcatggtaccttggcgtattctcacttttgtaggtgggttcatgctcttcgtcgataacgatcagtcccagatctgaaaacggtgtgaacagtgcggatctgggtcctaccatcacctggatctcaccacgttttgctcttttgaactgatcataacgttctccctgggaaagtctggagttcagaaccgaaaccttatctccgaacatggcataaaagcgcctgactgtctgataagtaagcgcaatctcagggatcagcacgatcgcctgttttccctcctccagtaccttctggatcaggcgcatataaacctgggtctttccgcttccggtcactccgaaaagaagtgcaggccttgggtccggctcctgccattcccgaaaaatctgctctgccgccaaaagctgttcctggttcagactcagttccatgttctccttcaccaggccgagcccctcgggaatgcgatacatttcctgactttcaatagttatcagaccttttttctcaaaaaaatcaagaacggaaatgccggctccaagctctttggaggcataggtataatctaggctcccggcctccaggattgcccgaaggaaccgctcacgtgctttaaagcggctgccttccagcttgccaagaagtgcctgcccctcttcctttttccctgtaaaaaggatcagtcttttctcttttgcacggaccttgtcttttacaggcagaactgttttcagtgcctggatcatggtggagccataggtctccttcatccaggccgcaagtgcgatcagccgggattctgttgtctcactgtctgtggacacaccccgaatctccttgagctttgacgcatcatattttgccgttccggagattccggtcacatagcctttccgaagggtatttccctttccgaagggcactgtgaccacaactccgggttttattgcctgcaccagctcctcaggtacacgatactgaaaatcccggtccagcttttcatgagaaatatcaatgatcacatctgcatagatcatccatttacgctttctgatcttcttccaggatctcccggatcagtacacgctcatccatgggatatttcttacccttgatctcctgataatcctcatggccctttccggcaaggacgatgatatctcccggctcaccgtgatggatcgcgtaggcgatcgcctctttacgatccgggatctctacatattttccatctgtttttgccattccgatcttgatatcatcgatgatggcctgtggatcctcatctcgcggattatctgaagtaatgatggtcagatctgccatctttcctgaaacctcacccatctcataacggcgcagcttggaacggtttccgccacagccaaacaggcataccagtctgtgcggatcatattccttcagtgttccgagaaggctctccagcgccatggcattatgtgcgtaatcgatcatcaatgtgaattcgtcagataccttgatcatctcaatacggcctttgaccctggccaccttcagagctttgatgatattctcctcggataccttaaaatggcggcagatggcaatggcagtcagagaattgtaaatgctgaacttacctggaatatcgatctccacaggaaaatccataagtcccttaacatgataggaaattcccagatagccctttcttccaacgagtctggcgtcctctgcacggagatctgctttttcggaaaatccataggtttcaagtttacaggtgtggccttcgataatgcggtcaaagtgttcatcgtcacgatttacgataccaaccttacactgtctgagaagcatggatttgcaatgcagataatcatcaaagtccttatgctcattcggtccgatatgatctggttcaatatttgtgaaaattccaaaatcaaacacaaatccctgggttctgtgaagcatcagtccctgtgaggaaacctccataacgaccgcatcgcagcctgcttctaccatatcatgaaaatatttctgtaccatataggattccggtgtcgtgttggctgccgggatatgcttctccccgataacagcctcgatggttccgatcaggccaaccttatatccggcattctcaaggattgatttcaccatataggttgtagttgtttttcctttggttccggtgataccgatggttttgagcttttctgccggatgtccgaaccatgctgctgaaataaaggccatggcgtaacgggtatcctctacctggatcactgtcacatcctctggtgcctccaccgcttcttccacgatgagtgtcttcgcaccctttgccacaacatcaggtataaatttatgtccatccacgaccgcacctctgatgcagataaaaaggctcccttcttctactttacgggaatcatatacaacagaagaaacctcctgctctgtacttccctgaaggcatttgtattcaagatgctccaataaggataaaagattcatttttctcctccatcttccctttttccggtctgacgggcagcacaccggaggcgggaaatatactgttcttattttctgtacataccatatagaatagcacacctcccccctgttttcaacgtttctttgaggtacggccgccttgtaaaatatcagcttgttactgttcactccgttctcagtaacatcagctttttccataaatatccgcatattttttccggagccagatgccgcccagcacagtcaccaaagctgtcactgccagaagcgtccacaaatccctcctggtatcatctccggtcttcggatgtgtggacgcagttcttgccatctgtatctgaccggaagccggaccctggtcatctccctgcaaaggcagcccttcttccggcgtaatagccacctctccttttaccatgacagaagcggaggcctccatcaatcgctctccggtttcctggcttgtgaccgtcacctggttaaaaagcttctgatccgctgtttttcccgggatcttcaccacagcctgaagagaaactgcctctcccggcgggatctgttggatcattgcctttgtacggctgctgttgagcgttacaccttcctgctccagaaactgtgcatggatccctgctgtctgaaagcgctccgttcccacaaccgaatgaagcgttttttcaccggtattcacgatacagatctgataggtcacagtctcacccggtgcagcggtttctttgtctgcagttttctttacagaaagatccgccttcagtgcctccagaccatttatagtggaggcgttcttccggatcacttcatccgctctgtccttcaccctggcctctgcttccacctggtgctccagatctttttcctgttcatccagaagcggcgcctgtacataaaagctcctgctctctccggcttttaattctgcaaattccgccacagccccttctgttagaagaccttctgcatcttcccacagctgccggatcttagggcaggaaaggctgctggtcagacggatatctgcaagatccagctttccggtattggctatctctacctgataacggatggtctgccctgctttcatttttttattctgtgcaattaccgacaattccatatcagcctcagcagcctccacgtccagcataggagagattccctctgcgatcaccagctcttccccgttttcttctgtcatgagaaaggttcccgcaccggtacagtccttctgaagcggttcctcctgagtcacaggataactgcttttctctgccggaaaacggtattcctgccgcagaatcagcgggatacggaaaaagatctcatcctgcccgttctgctccacgttcagcacgctttccagctttgtgatctctgtagcttcaccgctctggctccttacagaaatctgctgtgcagccatatttttcgggacagaatccgtttccggaacaaaatactccgaaatatacgtgaccagcgtcagcttttgcgtctcctcaaactcaccttcctcttcattccctacattttcccctccggtcgacgttccttccggtgtgagcggacccgttttctcctgctcttcatcctccggctgtactgtttccccggatgccagctgctccacgtgctcatatccttcctccatttctattccgattccttccacaaccttatccaccggcaattcctgttctgccttctcttcctgctgcaagtcatcctctggcagctcctgctctggctcttcttcctgctgcaagtcatcctccggcagctcctgctccggctcttcttcctgctgcaagtcattctctggcagctcctgttctatctcttcttcctgctccaccgatggatcttcaatcttatgaagttcatcgtcccacttctcatttttctccttatcctccgaaaaccttctcccggacagccattcattcaggccgcgaatccggatcccaagctccgcctgtccggattttatgtctttccagaacacactctgatcgataaacggtgcctgtcccggcaaaaaatctgctcccagagtcagctccggttctattgttcctcccagcatggctcctgccagcactgtcacaattccggctttcttcatctgtttccatattctgtttttcatggctcttcctcatttctgcctgatctggcatttcttatacacatgtttttttttacagaagcttacttttccacagacaaaggcatccctccccggcaaatgatgcatgatcaatgttttttcgataaaataaaatggatttctgcatcgaaacgatgcgtgaacagatcccgcagaatgcaggatcaagactttttcaatgtatcacattttcagaccatgcgcaaccggatataaaaattataaagtttgtttaaactttctttataaattttccatttcttttagattaacgacatattttaaacatattttctctatataataggtgttggatagatgaaaaaccactctctatctcccccctcaaaaaatagtaggaatcaaaccgtctgactggatcaggcggtttttcctgtctcggaaaacactcgattttctattgcatttcccacataggtcttttataataaaatataatactcgtgcatcgttttcgatgtactcgttactgaatacagtaactgatttcattccaatttttaagagaaacgaggtatttcctatgagcgaaaaaaccgtagtagttgcattaggccaccgggcacttggcaccacacttccagagcaaaaaacagctacaaaactcgcagcgaaggtagtcgcagatctggtagaggagggaacccgcgtagtgatctcccacagcaacggtccgcaggtagggatgatccacaccgcaatgaatgaattcggtaaggcccatcctgattatacatttgcaccaatgtccgtatgttccgccatgagccagggttatatcggctatgaccttcagaacgccatccgtgctgagcttatctccagagggatctataaaccggtcagcacagttctgacacaggttgtcatcgatccatacgatgaagcatttgcagagccggaaaagatcattggacgtgttcttaacgcagaagaggccgaggctgaagaagaaaaaggaaactttgtcacaaaggtgggcgagggccagtacagacgtatccttgcagcaccgaagccacagaagatcgtagagattgaaaccgtaaaggtcctctctgcagcagagcagatcgtcattgccgcaggcggtggcggaatcccggttcttgagcagggaactcagctgaatggtgccagcgccatcatcgagaaagacctggcagcaggacttcttgcagaagaactgaacgctgacactctgatgatccttacaagcgtcgagaaagtaagccttgaccataatacggatcacgaatcttatctggatactatttccacagaagatgccaagaaatatattgccggcaaacagtttgcggcaggctccatgcttcctaagatcgaagcaggtgtttccttcgtggagaagggaaccggacgccgtaccatcatcacagacatggtccatgcaaaagacggctaccgtgagaagaccgggactatcattaaatgatcattttacggactcagaatacaaagtgaactataaaacttcactttacataaaaatatcccgcagacggctactggtcttacctgcagctctgcgggatatttttatactgtctggctgtccgatcactgttccacagttgatcggacagccagcatttacatagattttcgctcagcgatctcagccatcttcgcctcattcaggcgggtatctccatggacacggctgtaggaaagatatccgttcatacggtcgatcttggtcagatttctggaaccgcagacagggcatacatccatctccagttcctcatgaccacaatcgtcacagtatgcaagagaaaggttcactccttcataatatcccagatccatggctctgcggatcagtgtacggatagcttccttattgtagccgatcggataacgtacatactgaatcttacctccattgcagagctcccagaaacgtccctccagatcctgtttctcgatcggagtcacatcctctgttacatggcagtggaagctgttgctcacatatggtctgtcagaaacgccctcaatgattccatacatcttacggaactgctctacctgcaggccacaaagactctctgccggtgttccgtagatcgcataaagataaccatcttccttcttgtactgatttaccttgtcattgatatatttcaggacctccagagcaaacgccccatcctcggcaatggatttgccattgtaaagttcctgaagctcatttaacgctgtgataccgaaggaagctgtcataggcttcaggatcttgccaatcttttcattcggtttcaaatgtccgccgtagaaaccgccttcacagtatgcaagcgggttggtggatgcacgcatctgtcccagatattcgtaagtgcggatatgcaggttacggatcatttccagatagaaatccagaacctcatagaaatctctgctctccgctctggcttttgcaaggatcatcggaagatgaaggcttaccgcaccaatgttaaaacgtcccacaaaaacaggcgtatcattctcatccgccggctccataccgccacgctcataccacggacttaagaaagcacggcatcccatcgggctgatgaccttcttgtatttcctgtacatactggaaatatagcctgcgccggacatagacagccagtccggatacatggttttggaggaacactccacaccagcctcaaaaatatcctcacagcactttcctggaccatggatctctttgtcataaaggaatacgatcttcgggaaaagtaccggtttcttgtgtccggccttaccctgtcctccctgatggacctcaagaagggaaatcgtacacatcttctcaaactgctcggttccgagaccaagtgtcaccgtaacaaacggataatcacctctggaagaaccgacggtattcagcttgtactcaattccctgccagccctgatcataatccctgcggaccttatcaagagcatactcaatagctctctcctcacggccactccagctctcgtccgagtatttcataaattcggaaatatatttatcatagctcttctttgcatacggtgccaggatcttatcaacctccggcactgtaaagccaccatactgctgtgctgctgtactgagaatgatatcccccataacatcaaaggctgtatccagagtcttcggctcgttataccagacattgcccatctcaaaaccgccacttaaaacagctgccacatcgaacagacagcaattcatggtatccagacgtgcagactggtcatgaatataaatgtagccgtccttacatgcctgaagctcattacggttcataaaaaacttccgatagagttccttgttcagctcattaaagatcaggcttcgtttcgtggcaacaagggcgctgtctgtattggcattacttttatcaccgatataacggatcgcctgactcttggtatagacatcatccatcatatggataaaatccagcttgtaattccgataatcacggtagctcttggcaactgccggattcacacgctccagagccccctccacgatgttgtgcatctcctggatctcgatctcattctttccaagggaatccgcatgctcctgggcaaaacggcagataaaatccttctcctcgtctgaaaaagtataaagaatacgctctgcggatttgttcacggcagccacgatcttctgcggattaaactcctctcttgtcccgtctttcttgatcacatataacattgctcatccctccctgtgctatatataagtcgctgtgcaaaatactatatatagtactcatatcttctatatattgtttttcatctatatgttgtgctaggcatgagtataacacagctgaggagaaaagaaaagggatatttctgtatacacgaaaatacagacacttagcactgcctgatctcactgcagaaatattctcacaaatttgttccgatccagtctgcaagaaaatcccataatttcggaagcagaatggccagtgtcactataaaccatatgatccagcctgccccgctgcttttctgatcttttttttgctgtttttttccctgatctaaaacttctgcacgatttctgcccaccgttgttttattcctggtattaactgccgctgcagtcttacgtccggctgctgcacctgtattccggcttccggttagattccgattcaaatcggtattgcggcttgcattcgtattccggtttatgtttgtattccggttcgcgttcgtattccggtttacgttcgtattccggtttacgtttccgttatgttgtgttgtttgatcagcatcctgtccatactgccgcatcatatcccgcactttggcggaagcatgtttataatgtatctcccggggctcattcagatgatataacacctcatcatttctgtaaggcatcccacataatgaacacctgccatttacaaccttacccccacaaacctgacacctttgacctgccataagctccctccattctatccgtcaaaacggatatttatatttccgtcgtaaacataagcattcttttttcagtatatcacaccaggcatttaatacccagcatttttctacgataccccaaaagacttcccctctcattatattgccactccacccattttctgctataataccccacagagcaataagcctaaaaatcatcaggaggagccgataatgaatacaatcacaatccccgcaacctatcatgcagacctgaacctccatgacacacagattgcgatcaaaacagtaaaagatttcttccagcagacactctcacagaagctgaaccttcttcgagtatccgctccaacatttgtagcaccggaatccggccttaacgacaaccttaatggtgtagagcgcccggtaagctttgatatcaaggctatcgaaggaagcaacgccgagatcgtacactcccttgccaaatggaaacgctacgcactgaaaaaatacggattttctcacggagaaggtctttacacagatatggtagccatccgccgggatgaagatctggacaatatccactctgtttacgtagaccagtgggactgggaaaagatcatctccaaagaagaacgttccatggagactctcaaggaaaccgtacgcaccatttacagtgtccttcgtaaaaccgagaaatacatggctgtacagtatgactacatcgaggagatccttccgaaggatatcttttttatcacaactcaggagcttcttgacatgtatccggactgcacaccgaaggaacgtgaatatcggatcacccgtgaaaagggcgccgtattccttatgaaggtcggaaaaatgctcacaaacggcgagcgccacgacggacgtgccccggactatgatgactgggaactgaacggtgatatcctcgtatactatccggtacttgacattgcccttgagctttcctcaatgggaatccgtgttgacgaggacgcacttgaccgccagcttaccgaagcaggctgtgatgaccgaagagagcttccattccagaaagcaatcctgaacaaagagcttccgtacaccatcggtggtggtatcggacagtccaggatctgtatgttcttccttcgtaaagcacatatcggagaagtacatgtctctctctggccgaaggagatcacagatgctgcagagacacacggacttcagcttctctaaaacagcctacagatttatttataattttcgcggaaatgaggtaataacgtgaacattctgttttttctgattcccaaaagcgaagtagcctacatctttgaggatgaaactcttcgccagaccctcgaaaaaatggagcaccgcaagtactcctgcattcctatcctcaccatggacggcaaatatctcggcaccatctcagagggagatctcctctggggcatgcgccgtgcagatatccacgacatcaaggaaacagagggaatcccaatcatggcgattccacgccgtgccacctacaaaccggtccatgcagattccaatatggaagatctcctggatcgcgccattaatcagaacttcgtgccggtggtagatgaccagggctccttcatcgggatcataaccagaaaatctatcatcaaatactgttacaacgaaataaaagccgcacagaaaactgccggtgaagaaatccactgagcagcggaaagaaaaaggatggcttccgttcctgcacaggtaggaatcggaagccatccttttttgatccggcagttgtattccggatttttattttattttttcgcggatcatactcagtgcatcttcatctgccacaaccgtgagatccgggtgaagctgcaggatagatgccggaaccttcggtgtgatcggtccgtacagggaattatacagggcttctgccttggatgttcccgttgccacaagaaggatcttttttgcagccatgatattcccgattcccatagtgtaggcctgtttcgggacctcatccatgctttcaaaaaaccttgaattggccctgatggtactttctgtcagatccacacaatgggtttctttttcaaaggcatctcctggttcattgaagccgatgtgtccgttcccgccgataccaagcagctgcatatccacacctccggtttgccggatgatttcgttatactgtgcacatgccttatcgctatcctcttccagtccgtcaggcacaaaggtccgtgctttgtcaatatttacatggtcaaagagattatgatccataaaatagcggtagctctggtcattgtcgccggaaagtcccttgtactcatccagattcacacttgtcaccctggaaaaatccagatccccttttttgtaccattctaccagttgtgcatacatgcccacaggcgtggaaccggtagccagtccaagaactgcatccggtttcatgataatctgtgcagacatgatattggctgcttttctgcttacatcctgataatcttttcctgcgtaaataatcatagttttttcctcagctcttattctgcgatcagtttatccagaagctccttggccatacggatatcttttttctgttcctcaccggagatctcacgctcaatggtaatatctccctgataaccgatctctttcagctttgcaataaatgcagaataatttactttaccctggccaaggggaacctcatcacccagatgatgtccatctgttggatattttccatcttttccgtgaattcccatgacatactcaccgaaaacctccagagcatctaccggatttgcctttccgtacataatcaggtttgcaggatcaaggttaattcccacatttccttttccgacagctttctcaatatcctggatcgcacgctttaatgttacaggagtctcctgtcctgtttcaaacaggaagttctgaccattttccttacatttttccacaatagccttacatgcaaccaatacttccgcgtatttcgggtcgtatggattttccggcatatagccaacgtgtgttgccaggtctgtcacatggatctttttcgcaaagtcagaaccttccataagcatcttcagtctctcaactctgtaatcagacgggatcaggccaagtgtcagctgtccttcatagaaatcccatactctgcggccttcccatccgcaccagaatgcggttgcgtggatcccgtatttctccagacctttattaatggactctgccatagcatcatcctgaagtgtcggacgatcccagcataccagctggcagctgtccacacccatttccttcagctcagcaaattttgcatcaatatctgtattgcttgtaaattcgatcaaaactccaactttcataggttctgttctccttcctgtattatctcatattatactacttataccaccaagatcagccttttaccgcgccggcagtaataccacctacaatatgcttctgcatcacaacaaagaagataagactcggtatcatggacattacgattccgggaagtgcatgctcccagtctgctgtctgtgcggaaaactgcatgtacagtgcattctggatattcattgccactgtgtttccgccaacgatcagctggttggtgatgatatcattccaggttgccagtgcatccaaaacaacgaccgtcgtgaggatcggtttcagaagcggaagtacaatgctgaaataggtgcggatcttacctgcgccgtcaatacatgcacactcttccagatcgataggaacattttttacaaatccatggatcatgtatactgccagaggcatacataagcccacacttaccagaatatatccggttcttgttccagtcagtttcacgttggaaaccagtcttgtcaaggtgatcatgtaagactggaacggaaccatcatcggcatgatgatcagaacaaagcatattttgctaagtctgctttttgttcttgcgagcttataggctgccatcggcgccataagcactaccaggatgacagtgcagaatgtataaagcaatgtattaaagatcagagacgggaaaccgaatttcgtccaggtctccatatacatcttcaggctccatgacttgggcagagccagaaagtcctgcagcatatcattatagggtttaaatgagtttataaagatcaataccagcggcatcagccagaagatcgcacatacaaaaataatgatcgtcagtgcattcacctgccgcaggttctttggtttcttcttcattatgcctcaacctccttactcttggtaatcttcatctgaattgctgtaatgatcagaacaaatactacaaatacaagagatttggcagtagcaagaccatatttgctgttaacaaaagcttccttataaatattatacgcaacggaaacagttgaattcgcaggtccgccctttgtaaataccatgataatatcgaataacttaaacgcaaatgtcattgatgtcagcatacagatcgagatcgcaggcatgatcatcggaattgtgatcttgcggaatacctggaaagaggttgctccgtcgattcttgccgcttccagaagctctcccggaactgcaatgattcctgcgatataattgaccatgtaaaaaccaagattctgccatactgccatgacaacaactacataaaaagcaagcttcggtgttccaagccagctccagttaaagaattcccatcctgtaacactgtaaagagcctcaaagccaggtcccaggataaatttccagatcagactgatcgctgtcagactgatgatataaggaatataataaaaagcacgtccaagactgttcactttgttctcacgtgccattacgatagcaactgtgagagaaacaatgtttacgataacaacataaaatactgcaaatttaagagtaaatctgacacctttccaaaaaagcgggtcagcagtaaaaattttcacatagttggcaagtcctacaaattccatgttcttgccgattccattccaattaaataccgaatagtacagattcattacaaatggaatatctgtggcaaacagtacaaaagcaactgccggaaagacaaacaatgcaaaaattgccagatcctttgtttttttgtttttcaatcctatcccctccagaaattcaatttttctttggtttatattggggaaacaggcaaacctgctgcctgtctccctcttttgtcagttacattccgtcagcccaaaatcaacaaatctgtttctcttcggctcctggagttccttgttattctgcagatgtccagaaatcctggaaaagctgtgttacttcatctgcgctcatatctccaagcatgtaggactggagatacggaccacactcatctgcgtagctgccaggagcaattgtgtggatccagccgtttgtctttccagcatcgatataggtcttagcatcatttgcaagagcgccggttactttcatatcagactttgcaccaggaacagcgcctacaccttctgccatccatttctggccttcttcggaggtaaggataaactcacaatactcttttgcaagatccagattcttggaatctttgtttacaatataagtccagttacaggaggataatacagttgcatcatcttcaccggagcctaccgggaatggaaggaatgcaagatttgcatccggattaaaggaatccagtgtagactggcaccagtcacccatatggatcatagctgcttcgccatttgcaagcatattctctgatgtctcccagtcaacctcaagcggcttgtccggaccatactctacagcaagatcaagaaatttgtaaagattctcccagttaggcatatctgcaaatgatgtctctccggatttgatcgcatctactgtctcagcagctgttttgtctttgtcgatcatgaaatgtgttgcaacctgtcctaatacccatgtttcctttgaagcaagcgcaaacggagtgatgcctgcatccttcagcttcttgcatgcctcttccagctcatccatgtttgtcggaagcttgtcgataccagctttctcaaagcagtctttgttgtagatcagacccatgttctcataggtccatggaagagattttacatttccctcgtcatcttttccaaggtttacagcgtcctcattgaacttgtccagaacttctgtatcattgctccagtcgtaagcataatcatagtacattttcgcttttgttccggcctcagcatcaaatacgtctggtgtatcaccggagtttactctggactgaagcagtgtgtcgtaatcgttggctgcatgctgtacatcaacagtcacacccggatgtgattcctcgaaggcttttaccatctcgtcatattcttccagaccataagcatgtgcatcaaatacattcagtgttacattttcttcagcatgtgcagttacccctcctgcaactaccattgatgagatcattgctgctgataacagaatagaaatcactctttttttcatttgcatatcctccttttgaatagctttttttatttttctcactgcctttcagtgagaatttcattatttgttttcgtgtgtgtttacatactcttttgccgcattccactctttaatcccaagctgtacggatcttactccttcgatcaaaggagcaacctctacaggtttatcttctctgacgcattcctggaaatatttgatctctgtataatatggtcccagattggagacattgattcccgccacatcactctcgccttcatattcagctttgagctctggcgtctccacagttccgtctttcttatatactgtcaggctcggtgactgagcaccgttaaattctatcgtagcatcctcaaaatgtgcacggaacgctgcatggaacttcattgccgatgactcatcccaaataccctctgctgtagcaaaaacatctccgaattcatactccgtgatgatatgattgatcatgccactttcaaatctgctggcttttacctggaagctgtccggctcacccagcatataacgcagaaaatcaagatcatgcacgtgaagatccagcacaacggaaccactcttttcttcattatggaaccagtcctcaaatccccatttcacatctccgctgatacgctccatagtaatggatttcagctttccgaatttttctgtgtcgtaagcttccttcagatatttatattcctcaaaggaacgtactacctgtcctaccataaccttcttcccggatcttttttctgcttcaagaagcatctggcaatcctcttcggtcagacataccggtttttccaccagtacattcatccctttttccagtgccttcactacatgttctgcatgcagatagcttggaagacagatatgtacaatatccagctgctccttttcgatcagttccattccgtattcatatgtggcagcttccggaaaatatgatgccgctttgtccagaaattcttttctgcagtcagacagggcaactacctcaacatcatcctctttttctgataagactttcagggataagtaatgagtcgttcccattccgccgcatccaatcacgcctattctcatctctctacctctctttatttgtccagtggcctaactaatatttcaaaaaataaaagctttttgcaaaaatgtctgtgtttcttgctacaagctctcttttttgctgctcttagcttggatttaggatagcatcctttgccgtatctgtcaacattcttttccgtttttccgtctttcaatgtgcatttcttgtataataaacaatatttcaagtatttttttgtgcatcttgcgcatttgtaatcaattattcctgtcactgtactatttatctccatttttttaccagtcttccaaaaaatgcctgtgttatattgctcttcattttagaattgtcgtatttttacattttttcttctatgatagtcaatattttctttgtacagccacatattgattattttctgtatctatgataggatatatttagtgcggagactttactaatatttttcggtaccgtttatttttaaaggattggagatgaaaagaaactatgaaacttgttaatcagcaggttattaagaacacgaatatgaaacggctctatacttccatctattccagtcccggaatatccagagcacaccttgccaagcagacgaagctcagcaaaacaaccgtatctactcttgtagatgaactgatcgaacggggattcattgtggacagcggtatcggagaatccgacagcatcggacgtaagccgaactgccttcaggtccggatgaacagctactacgttgttgtcatgaactggcatgaaaatgctgtcgaagcttatcttgtggacattgccggtacttccgtctttcatgaatcacggaagctttccgaagatgaaaatcatgtcgcatgctccggctcctgtttccgggaatccattctggaacactgtgctcctgaccgtatccttggcatctgcatagtaatgtccgccatgatcgacgcctccagcaatgaagtatattccacgaccctgaatctgccttccatggaaagcactcagatcattaaatctctgaagactgcattcccgggatacccggttgatcttctcaatgataccgcctgctattcctacgcggaaaaggtctatggcaatataaaagagaaaaattttgcttttctcaatttcggccgcggcatcggtgccacccttttcacagaaggaagcatgcttggaactgccagtggttcctctacccagttcggccattattccatcgatcctcacggtccggaatgtatctgcggaaatcacggatgtctggaagttatgatctcggagcaggctctgaaaaacaggatcccggaattcggacagattccatccttaagcgcactttcagaaatcaccttctcagatctgggaaaggctgccaccttccgcgatccaaccgctcttgctatggtaaaggagatggcatgggagctgtccatcgccctgagtaatctgatcagtaccgtaaatccatctctgatcgttcttggcggaaagattccggatcttggcgaatattttctcaatgaagtacgggaagacctgaaaaaaaccgggttccgcaggatggtagataacgtgactgtccgttactcccagctccagagtgattcgttcctgaacggagccatgaaatacttttttgatatccactattcttttacaaatcaggatccgacgaatttttttatcggatgatataaggaggaagccatgaaaaaactgaaagctgctattgtaggctgcggccgtatttccgtctcttatgcggatgcattccatcgtctcagcgatgaagtagaattagcatatgccgttgacaaagatccagctcttgccaaagcctttgcagaggaatttaactgttcctggactacggactttgatgagatcctggataaggatattgatgtggtacatctctgtctgccgcatttcctgcacccggtcatggccatcaaagccatgaaagccggcattaacgtccttaccgaaaagcccattgccacctgtcttcaggatgcagacagaatgatccgtaccgccgaagaaactcatgtaaagctgggcgttatcttccagacccgttacacaaaaagtgtagaaaagctccgcgaaatgatccagcggggtgatttcggaaaaatccttaccgcacgttcctatctgacctggaaccgtccgctcgactattacagcggaagtgactggaagggaacatgggacaaagagggcggcggtgttctcatcgaccaggcgatccacagcattgatcgtgttcgatatatgctggattccgatgtggaatggatcgacggaagtgttcataattatgttcatcattttgtaaaagtggaggatgccgcagacgctgctatcatgtttaaaaacggctgtctttacaatctctatgcctgcaacatttacggagccgattccccgatcaatattgaactgatcggagaaaaaggacgcctgggtcttaagcaggacatgggctattacgagctggacggcacctatgccgagatccgaaacacttatgagaccacaaatgtgggccctgattactggggaagcagccatcacctgcagatccgtgacttctaccgttctgtccgtgaggatcttcctgttgccatcgacggactggaaggcagaaaaacccttgaaatggtaaagggcatctacctttcctctgccagaagagaacgcatctctctcccctttgaggatgtaacctacagtgatctgaaccagccggtgaaataactacgtcactattctgtaactataaaaaacggatgctttatctcctgcagcatttccacaggaggataaagcatccgtttttaatattcttatatttgtaatgtcattataatgtctttgaaagaaactctcgaagtctcttattctttggatttgcaaagaattccttaggagaattttcttcctggatctttccttcatcaatgaagaggactctggttgccacctcgcgggcaaagcccatctcatgagttaccacaaccatggtcatgccggatcttgcaagctcctgcatcagttccaggacctctcctaccatctccggatcaagagcagatgtaggctcatcaaacagcatcacgtccgggttcatggcaagagatcttgcaatggcgatacgctgcttctgaccgccggaaagcatgtccggataggaatctgccttatccggaagacctactcgctccagaagctccagtgccgttttttcagcctcttccttactcataagattcagagtcacaggtgcgagcataatgttctcttttactgtcttatgtggaaaaagattaaactgctggaataccattccgatcttctgacgatgacggttgatatccaccttggaatctgtgatgtcggttccctcaaagaggatttttcccccggtcggctcctcaaggagattcagggaacggaggaatgtagatttaccacagccggatggtccgataatggctactacttcacctctgcggatctgtgtggtgatcccgttgagaacctgattgccgccataggccttttcaagtccctgtacatccagaagcacttcattacttacgctcattggttctcagcctcctttcaagtcttcctaccagataggtaagaaaacaaacgatcacaagatagatcgcagctactaccagcagcgggaacagtgcactgtaggtctggcttcggataatgtctccgccacgggtcagatccataagtccgatataaccactgatggatgtctccttcaaaagtacgatcagctcgtttccaagggccggcaggatgttcttgaccgcctgcggaagaatgatcttgatcatagtctgtgtatagttaagacccaggctccgtcctgcctcaaactgtccctgatcaatagacatgataccggaacggacgatctcagccacgtatgcagcagagttcataccaaaggcgataatggcaacaactatcttacccggatctatggttgcaaaaataacataaaatacgatcagcagctgtaccatcgttggggtgccacggatcacagtcagataaacacgacagatcacattaaggatcttaagcttacctgtcttatcatgtgtagaacggacaatagcaatgacaaatcccagaaaaataccaagaagtacagcaaaaaaagtaatgatgatggtatttttcagaccggacaaaatgaactgccagcgattgtcgttcagaatcctctgatttctctgtgcaaaattatttctttacaataacaacctgctctgcagttgtgtacggatcagtgaaatcaacgctctttttacgatcctctgttactgtcattcctgcagcaccgaaatcagcttttccggatttaacagaatttacgatcgcatcaaactccatatcctcgaccttcagctcatatccaagcttgtcgcagacagcctgagcgatatcaacatcaatacctacgatcttatctccgtcatagtattcgtatggctggaaggttgcgtttgttgccatggtaagagttcccttggagtgatctgcatccttaggagtctcatacggtgtcttacctgcatcatcaccgatgtagttatctctgatggaatccagagttccgtcatccttcagctccttcagcgcttcgttgaactctttggtaaggtctgcattatctttggaaagacagattgcatactcctctttatcaaaaatatcctcaacgatctcaagatcatcgtttttctcaacaaatttcttagcaggctcgctgtcgattactacgcagtcaatcttaccctgtttcagagccataacagcgtcattacctttgttgtatctctctactgttgcgtctttaacctctgtagcgtctgcatcaccggttgttccaagctgaacaccgatcttcttaccctccagatcatctgcgctcttgatctcatctgctgcaaaaacagcggatgtcatagaaactgtcatagctgctgcaagtgcaagtgccataaattttctcttcattttttcttcctcctgaattctatgtactttacgttaactgtctctctgcttgtgtcagtccaattcgtaatgtacagcataattatacatctccatgcatattactttgttttatgataccatgtttctgacaaaatgcaagcacataaaatccataaatacgaaaatccacttctaatttaccggaattccacagggaaaattcacttttcgataacaattgttcagtatactatactattaaaggcaacaaatggaaaaaacctgcgtgttttttccatgggggcttgtgctccaacagaaaaaacaagtataatattcagaaacaagaggaggttactattatgaaattcacgaaaatgcacggcattggaaacgattatgtatatgtaaactgttttgaggagactgttaaggatccggccgcagtggcaaaatttgtcagcgaccgtcattttggcattggttccgatggtctgatcctgatccgcccgtctgagattgcagactgcgagatggatatgtacaatctggacggctctcagggtgccatgtgcggaaacggtatccgctgcgttgccaaatatgtctatgaccacggcattgtggacaaaacttctttaagcatcgccacaagaagcggtatcaaatatgtggatcttactatccgcgacggcaaggcctccatggtaaaagtcaacatgggctccccgattctcactgcaaaagagatcccggtggttgccgaaaccgagcaggtgatcgacgctcccatcaccgtcgacggaaaagaatatcacatgaccgcagtttccatgggtaatcctcatgccatcatctacgtagacgatgtgaacagccttgacctggaaaagatcggcccgtcctttgaaaatcacgtatgcttcccggacagagtcaacactgagtttgttcaggtgatcgaccgccacaccgtaaagatgcgtgtatgggagcgtggctccggagaaacccttgcctgcggcacaggcgcctgcgcagttacggtagcttccatcctcaatgacaaggttgacggcagcaaaccggttactgtacagcttcttggcggagacttaaacatctcctgggaaagagatgaaaaccttgtatatatgacaggacctgcaactacggtgtttgacggagagatcgatcttggatttttaggtgaataaatgaaaaaggagggagcttttcgaagctccctcctgcatattatacttttcagataaataccagaaccctctccacgataaacaccgccgcacacgccagcagggctactgtgatcaggcttttttccttatatgcagcaataagtgctaccaggaaacctgctgcaccggagatgatgctgtctgtggccttcaggatggccgggaaggtcatggctgccagacaggcatatggcacataatacagaaaggacttgataaacgggcttctgatctcgttttttgcaagagcaaggggcagcatacggatgagataggtgacaattgccatcaccaggatataaagatatacattatgactcatgaacggcttcccctttctcttccagcgggcagaaataagctgccaggcctgctaccagaagtgttgtgataatgatcataaatccggatgatacctgttttaacaccggtgtcaccgcaaaaacagtactgactgccatggatgccacaaccaccccaagaaccggtctgctctttttggacggcgggatgatgatggccaggaacattccgtaaatggcaacgctcaacgcactaagcataaaatccggcaaaaggcttccggagattcctcctgccagagttccaagagtccatccgggaattgccacgcacatggctccgtaattataaaatacgctgacctttccctcctgggccgcactgatcccgaaaatttcatcggtgataccaaaagcagcgatgtatttcaggataccggactcctcacgccggaatttctgggacagggaaaatgacatcaggcagtatctcaggttgatgatcagctgggtcattgccatctcccacatggagcctcccgcaaaaataatgtccagtcccgcaaactgaccggccgatgtcaggttggtcagggagatcagaactgcctgccagatacgcaagccgccggcaacagccatcatgccaaaggtaaaggataccgcaaaatatccaagagcgatgggaactccatccttcataccttttctgaaactttctcttttcatcgatttcctccattgtatgtacattccgttataaaacgcaactatgaaaagcacctttgcaggcttctccgatctgtgcagcgatcaccagcgtctcgtcttacagcgatccaataaattagtgcatcgctatagttcgttgtacatgtaaataagagcgtgtccggaaacttttctgcttcctgacacgcccctttattgtagcattgccatatcaaaacttcaatacttcacagcaaacacagctgtgctttttcaccgattttatgctttttccactattttatagtaagatctggctgtcatggagtagatcagtccatagaccagcgcaaaggccagaaccgttcccgcagtgcagcccacgtacaattttgtattggccattccgaacagcagcaggagccggcggatcagcggaaatgccatggaaatatgcaccattgccatcacaagcgggataaaaaataccagaaggatctgtctgcggatagctcctttcacctctctgcggctcatacctactttctgcatgatctggaaccttccctgatcttcgtagccctctgagatctgtttgtagtaaatgatcatcgccgttcccataaggaacagtgctcccaaaaagattccaataaacaggatcgttccattatctacataatacgtttcgtactcactctggcggacaccaccgatcacgatggtattctctgaaaagccaccgcttctgcagtaatctttcagtgcctgataaacagcctggccataccggatcttttcctccccgctgccacggatatctacacccaaatgaactgtgagatcttttccagcctcgtaggcatcaagaccttcatacatctttgtccgaagcccgtcaatatactcgaaatcggaatccgtcacaacaattgccgccatattggataccagattgttcatggcacttaaaggtgctttttccagccatttttttactgcaaaatcccggtcatcaatttttaatatgtctttttccttttcagacggataccaggcaaagatctcgccgtcgtgaagatctgttttttcaccggtaagtttctcatactcagactgacggatcgtatacagatctacggattttccatcttctgagtaactgtaagcctgtccgatcataataccgtttttttcctgcctgcagccgatctcgagataagtttcgtccactgttttttctgccggcacctgatcatttttgattgcctgtgcaaaaactttctgaatctgttcactctgttcctggctgatgcccgaaatcctggcatccgtatcaaaaggataccggttcaccatgatgtcacccattccaaaatacagcgacacagtcatagaaagaagcaggagcactcctgtacttaaaatacagatgctggccaggcctgccgcattttgtttcatacgatagatcatgccggagacactgataaagttgccggttttatagtagaactttttgttctttcgcaaaagtttcaggattacaatgcttcctgcggtaaaaagaagatacgttcctgccataaccagaatcactgccagaagaaaaatgaaaattgcctggattggggattccgtggttactgccagataatatcccactccaagagaaatcatccccagaagtgccatgagccattttgcccggggctccttctctcctgtgtttccgcctctcagaagttctatggggttattcatccttactctggtaagattcagtgccagaataacaagaaaaatccctccaaatcctgcgatgcaaaacaggattcctgtaatggaaacataaaatcccagcactgccggaacatgaagaaaacggaaaagcaaaagcagggagagcttgcttccaaggatgccaatcccgatccctgccgtcagagaaagcagcgaagtcatgcttgtttccagaaacatcacttttccgatatggcctttttccagtcccagaatgttgtaaagcccgatttctttctgtctgtgtttcatgagaaaactgttgctgtagatcagaaagataacgcagaaaattccaacaaccacttcaccggttcctacgatcatcctcacttctgctgcctggggcactgctttctccaatgtgggacagtcccgcagaaattccatcatatacatcatggcaatgcagaaaatgcaggtaagcatatagggaacataggtgctccggttattccggatgttctgcactgccagttttccaaacattcctttacgcataggtctcaccgcctgtcgtaaggatcgtcagggtatctgcaatcatctggtacatttcctgtcttgtttttgtgccacggtagatctggtggaacacttcgccatccttgataaaaagtactctggatgcgtggctggcggcctgcgcgctgtgagttaccatgagaatggtctggccttcccgatttacctcattgaacatggaaagaagatcggaggctgcacgggaatccagggctccggtcggttcgtccgcaaggatcagcttcggatctgtgatcagtgcccttgcaactgctgctctctgcttctgtccgccggaaacctcgtaggggaatttttccagaagctggttgatgtgaagggcttttgcaatgggacggatcttctgctccatctcctgataatcttcccctgccagcacgagaggaagataaatattgtcccggaggctgaaggtgtccagaagattgaaatcctggaacacgaagcctaagttcttccgacggaatgcggaaatttctttttctgtcaggtgagtaatgctttttccttccagaagcacttcgccggatgtggggcggtccagggctgccagaatattcagaagtgttgtttttccggaaccggactctcccatgatcgccacatattctccttcttccaccgaaaatgtcacattgaaaagtgcctgcactttatttccgccgaagcgggtgctgtatatcttttttacatttgttacttccagtaatgccatacgctaattcctttcttatctgtatttacagcgatccagggagtcgtgcatcatgttctaaagcgatcgaacctgatgtaagaattacccgaaacgctatgttatggtttcagtataagaaaattctccggcggctgccatcgaagtggcttacattttacggaggaagcttacatttgtgtaaggttaatacatctccagatcttttttccacaggctcatccgaacttccgtgcctttatccacctgggaatccacagtgatctcgtgacccagttttctcaggatcttccggcttaaatacagaccgatcccggtagcacggttgtcctcccgtccattgacgcctgtgtagcctttttcgaagatgcgcggaagatcctccggctggattccgatgccggagtctgcgatgaccagagttgccggggccgtattctgcttcaaatttggattctcagataccctgtttccacgctcatcctccagccagatttcaatgccgcccgttcttgtatatttcaacgcattggaaagaatctgtccaatgacaaaaccaagccatttttcatcggtaagaacgatcgcatctgtcccctcatatgataacgaaagcttttttgacacaaagatccctgcgtatttatggatctgctcccggatgatccgatccagcgagcatcgggtcagcttcagatcggcggacatgtcctccgtgcgaaggtagcccaacaccatctccacatactgttcaatgcgaaaaagctgtgccccggactcccggttctcctccggctcctcccgaagcagcaggcgtagagcaaagatcggcgtcttgatctgatgtgcccacatagtgtagtaatcggtcatttcttccagagaacgctgccgttctgtctccgcacccatccgcatgccgtccagtttccggatgatatccctgtaaagaagctccacctcatcggtggtctcgcccagccggtccagattaatctccggagctttttccaccaggattaagttctgcaccttctgtctgtaacaggcataaccgtataaaaaaacggcagctcctgctcccagccacagaactgccagatagaccgccgcctccaggggaagctggtacaggcagatcactgctgtcgacacagccgccataaaaacacaggcgatgaaaaaaatttttgtctgttttaaatatgctcgaaatgattccataaaaacctcacaccatatatccaagaccttttcgcgtgatgataaaatccacaaggcctgccgcctccagttttttgcgaaggcgtgtaatgtttacggtcagggtgttgtcatccacaaagctgtcactttcccacagttttgtcataatggcatctctggataccggtttccctgcctgggaaaaaagcagttccaggatacgcagttcatttctggtcagttccgtctcctccccgttccaggtcagtgtcgctctggaaagattgagaaccgcgcctttatgttccaggacatttcccgggtttccgaaggaataggttctgcggaggattgcctggatcttggccaccagtacgtccatatcaaaaggcttggcaataaagtcatcggctccacggctcatggccatgaccatgttcatgttatccgctgcggaggagatgaagatcaccggcacctgggaaacctttcggatttcctcacaccagtgaaagccattataaaatggaagtttcagatccagaagaacaagctgaggatctttccccgcaaattcctgcagtatattggaaaaatcctcagccagaaaaacgtcatatccccaggaactgagatgctttttcagaagattcgcgattgtttcgtcatcttctacaataaaaatacgatacttcattcctgtttgtcccttttatgcgattgattacgcctctgcttctccatccggatctaccaggcggttcagaacctggaatccattgttacggagaacactctctgcaaccagaagatcctcacagtgcatgatcgctaccggaactttcaggcctctgtggaagaaggtgtagatgtaatgaaggtttacgttgctgtcgcccatgacactaagaagcttgtctaacccaccgatctcatcctgaaggtctaccaggatagcctgtgtgatacgagtcatgtatccatgctcagccatgatctcatctgctctttccggattgtcgcataccatacggaagtttgcaaactccggtgcgtcaaagcagccgaaaccgtagatatcgatctgattctctgcaagaatctttgtaactttctgaagactgcctggagtgttttctacgaagacgatgttctgttttaccataataattttcctcttttctgttattcttttttattttctttttttattttagcatgaaatttggtggaagtgaatcccttccccagcggggcccttccgggatggagcgttttgcgtatacattcatacattaaagcgtaacgcttttaatcattaaattcaggtataagtatacccatctcgacatgaaatgtcaaccatcttttccaggccccaaatctcaaacataaaatatcataacataaaattcccaatataaaaaaggccagacacacatccaacagacatgcgtccagccatccattttttacttacagttattttggcaaaaaactcaatccaactcttcgtctacatacttctgtatattagaagcattcacatacttcctaaccttcgccccgtcagtaatgacaagcgtcggggcctgacggatcccatactgcttgacaagctcgggattctgctcagcatcgataatctccagctcttcgccttccagcattttctttgccatacggcagttcggacaagtgctagtcgtaaaaagatatttatgagattccacaggctggatctccacctcgtcacccttcatggtcatcacactggtatggacctttttcagatgggaatgggtaatatcatagagggtacggttcttgtactcctgggtcttaccatcgttccagttctgtacaggacggtaatatcctgtgatacggctgtaaacctcagccttctttccacatttcgggcaggtgaaatgctcgccgctgatgtagccatgctcctgacatacggaataggtcggtgagatggtgtaatagggcaggcgataattctctgcgatcttacgtaccagcgctgccgctgccttccagtctggaagcttctccccaaggaatgcatggaatacggttcctgaagtatacagagtctgcagatcgtcctgaatatccagtgcgtcaaaaatatccgcagtgtaatcaaccggcagatgagagctgtttgtgtaatacggagtgtcgccctcttttcctgctgttttgatatccggataacggcttctgtcgtgtttggcaagacggtatgcagtggactctgccggtgttgcctccaggttgaaaagctctccaggatactgctcctgatagtctgaaagacggcttctcatatgctccagaacctcttttgtaaacttctgggtttccggatctgtcatgtcttttttcagccagcaggcatttaagcccgcttcgttcattcccacaagaccgatggtggaaaaatgattgtcaaagcttccaagatatctcttcgtgtacggatacagtccctcctccagaagcctgctgatcacatctctcttgatgtgaagagatcttgcggagatatccatcatgtggtccaggcgctgataaaattccttcggcgttctggaaagatatgcgatacgcggcatattgatggtaacaacgcctacagagcctgtgctctcaccggagccaaagaatccaccactctttttacggagctcacggagatccagacggaggcggcagcacatgctgcggatgtcgcttggcttcatatcactgttgatataattggaaaaatacggagtaccgtacttggaagtcatctcaaagagaagacggttgttctcggtatcagaccagtcgaattcctttgtgatggaataggtcgggatcggatactggaatccacgtccgttggcatctccctcgatcatggtctcgataaatgccttattgaccatatccatttctttcttacagtctttgtatttgaaatccatgtccttgccgcctacgatagccggaagctctgcaaggtcgtctggaacggtccagtccagtgtaatgttggaaaatggtgcctgagtgccccagcggcttggagtatttacgccatatacaaaggactcaatgcatttcttaacctccggataggaaaggttgtctgcctttacaaaaggtgccagataagtatcaaaggatgaaaatgcctgtgcgcccgcccactcgttctgcatgatacccaggaaattcaccatctggttgcagagtacacttaaatgctttgcaggtgcagaagtgatcttaccctcaataccaccaagtccctctcggatcagctgcttcagggaccagcctgcacagtaaccggtcagcatggacagatcatggatatggatatctgcatttctgtgtgcatctgcgatctcgttgtcgtagatctcagacagccagtagtttgcggtaactgctccggagttgcttaagatcagacctcctacagaataagtaaccgttgagttctcctttacacgccagtcctcaacctttacatagctgtttacgatttctttatagtcaaggatggtggatttcatattgcggatcttctcacgctgcttacgataaaggatatacgccttggcaacatcagaatatccggcctggatcagtacgttctccacactgtcctggatatcctcaacagaaatccggttgttctcgatcttattctgaaaatccgctgtaacacgaagtcccagaagatcgatcatatccgaactgtaattcttacctttggcatcaaatgccttatcaattgccgcagtgatcttccccattttaaattcgtctaattcaccgtctctttttactacctgaaacataagaaaatgcctccctcatgcatttatttataagcggatatttcattccgcctcacttgcctgcttacgaacacactccgtttcacgatctgtgttcaaagcgctgtaggtttattgtatcagacacgcctctttgcgtcaacataaaaagcaccatatatagtgcccgttttgttcacggtactatatatggtactgagtagatattttaacattatgtgactttcggatagatttcccgcggaactcttgcttttacagcaatccctccttcggtatactcttccgaaagaagctgtccatactcacggatcagctggatctgaccggcctccgaataaggaaaaagccgttccatataaatctgtccttctgccagtatctcagaaagaagctgcttaaattcctcaagcccctctcctgtccgtgcggaaatcttcagcgtatggtctgctcggagatcccgaaagctctccccggaaacacggtcctgcttgttaaaaagtgtgatcgtcttttttcccagagcaccaagctctttcagggtttcatatacgatatgcatctgtatctccgcctgaggattggatgcatctaccacatgaatgatataatccgcatatttggcttcctccagagtactcttgaaggcttccaccagattgtggggaagcttgcggataaagcctacggtatccgtaagaagaagctgctgtccgtcatccagtgtcagaagacgggtagtcggatccagtgtggcaaacagcttatcctccgaaagcaccgaagcgcctgtcagtgtattcagaagcgttgactttcctgcattggtatagccaacaatggctgctgtcttcagatttcccacagctcttctggaacggatcagctctctgtgcttttctacctgggaaagctcctgcttcagtgcggatatcctgttccggatcagacgacggtctgtctccagctttttctcaccagggcctctggttccgattcctcctccaagtcgcgaaagagaagaacgtagtcccacaagacgtgcagaccggtaacgaagctgtgcaagctctacctggatcttgccttcacttgtgacggcacgcttcgcaaaaatgtcaaggatcagcagggtacgatccataaccttgcactccagctcccgctccagattgttcatctgggcaggagaaagctcatcgtcacagatcacaccattggcatccagggcatagagaagaccttttacctcttcgatcttgccttttccgatataggtgcccggatgtacggcctcacgattctgaatgatcctgcctgcaaccgccgcacctgccgtagccgcaagttctccaagctcatccagggattcctccatgtcatccccccgatctgcctggacaccgatcaggataaccctgtcctgtatttcctcaaaatattccatatcagccctccgaagacgttctggttttcaggaaagcccgctctttttttgcagcggaatcttcagggaacatctcaatatattcctggaccttggtcagtgcagtagcaaaatccagctttttttcataggctacgatctcattgaacagaagactctgcatctcgtctgtggtagctgtcggaaggccttttgtgatattatcaagagcggaatcataatctccgcttcggatatcgcacagtgccagaccattatagcccttggcggaatcacccactgcggaaatatactgcttgtacattgcctgggcattttccacatcatcctgggccagatataccattcccagaagaagcaatgcttccgtattatccttcttggttgcttccagaagctctttttttgcgttgctgtagtcttccatataatagtagacacggcctctgtcacagtggtcctgggcgtccttggcctcagaagaaagagcagcttccagatatctggttccgtccgcttccatatccttgtccagatatgcctcatagatctcgatcgccatatcataggtggaatcttctccataggcctgtttgaagttagatgcggcttcttcgtaggaatccatggcaagggcaacctttccggtgagaaaataactgcctgcatccatggaaaaatcttctccaagtgtctggcagtctgccatggcatcctcgtattttccagacttcagctctgcagtagcccggtaggacaggatatccttacgaaggcttttgcttactttatcgcagttcagagcttccgtgaagctattcaccgcatcctcatatttgccaagacgcaggcttgcgatacctgccccgcgataggactgtgccagcttcactccgttctggatagagctctggtactcctccagggcatacttgtagcttccctgggaaagatcctttccggcctgttcatatatttttgttttttcactgccacagccgcccagaagcaaggctcctgtaacggctgcaagaatcaatacggtctttgtttttttcatggaattccttattctacaacaagcccttcggcttccatcacatcaacaacactatctacatatttatggcagagatcatccgttcccgcttctaccataacacggatcagcggctctgtaccactctcacgtaccaagatacgtccgtcatcgccaagtgcctctgcggctgcctcaatggctgcttttaccttttcgttctccagtgctgttttcttgtcggaaacacgcacattccggagaagctgcggataaaccttcatctcctttgcaaggtcgcagagtgtggtcttctgatccacacatgcctccatgatcataagagaagtcaggatcccgtcaccggtagcggaatagcgactaaagatgatatgtccggactgttcaccaccgatactgtaattgttttccatcatgttctcggcaacgtatttatcaccaactgcagtctgctcatagtcgatgccttcacgctccagagacttgtaaagaccaagattggacataacggttgttacaactgtatttccgttgagctggcctttctctctcaaatatttgccgcacacatacatgatcttatcaccgtcaatgatgtttccgcggtggtctacggcaatacaacggtctgcgtcaccatcgtatgcaaaaccgatatccagacctttatctaccacgaactgtctcagaacttcaatgtgtgtggaaccgcagccacggttgatgttggttccgtttggctcattgttgatcacataggtttttgcacgaagtgcgtcaaaaacactcttggcaatggcggatgagcttccgttggagcaatccagcccaaccttgatatttttgaaatcatggcatgggatagagatcagatgtccgatataacggtttcttccggatgcaaaatccacagtacagccgatatcttctccggttgccagcggaagctcctcgatctcgccgtccagatatgcctcgatacgtgcttcaatatctgcggaaatcttctgtccattctcattaaggaccttgatcccattatcattaaacggattatggcttgcggaaatcatgataccgcagtcaaaatcttctgtacgtaccacataggatacacttggagttgtggttacatgaagcagataggcatctgctccggatgcggtaagtcctgccgcaagggcatactcaaacatgtaactgcttcttcttgtatccttgccgatcacgatcttcgccttgtgatctctgccgtaataccagccgagataacgtcccacacgaaatgcatgatctgctgtaagttttacatttgcttcaccacgaaaaccatctgttccgaaatatttacccataatgttctcctttattactgatacagtccttccggataaacgccgtcatctgtaagttttttgaatgcagcctgtacagatgccttatcctcctgataggtaacaccgaaccactcgtcctttgtctcaagaacatctaccgctgcttttccggaatggatcagctggtcgataagctcaggaagaagatactcttttttgatgtctccctctttgatcccaccaaggaactcaacgaagcctttctcaaggatctccataaattccggtgtcagtccccacatattcatggaaacaaggctctttgtatccagtgtttctgctgtaccatcgtcatttcttgtctctgcgccgtctgctgtcttgaagatgttatgtgtctctgtaacgcccacaagcttgccatcctcaatatggcacactcctcttgtgacgcttccgttgtcacttaatgtatttccaaggcggaaacctgccatgcagatgtgcatcgggccatcctgcggatgatcctgtaccaggtagtcatgcacctttacgtaggcttcttttccgtagtagtcatctgcattgataacagcgaatggctcggaaaggactttctttgctgccagtacagcgtgtccggttccccatggcttggtacggtccgccggttttgtaaaattgcccggaagatcgtcgatctcctggaatgcataagcaacttctgtaatgttggagatacggtctccgatcacttttttgaattcatcttcaaggtctttgcggatgataaatacgaccttgttgaatcctgcctccagtgcatcatggatggaatagtccataatgatctcgcccttcgggcctaccggtgcaagctgcttgattccttttccaaaacggctgccgataccggctgccatgatcaccagtgctgtctttttcattttcgtttcctcctgatttattataattttttgaactctgtagctgtaatcagcgcttactcctgttcattcagctttgtcagctttactgcctggtctgctgcgatcagactgtcaatgatctcatccagatctccgttaaggatattctcaagacgatgaagggtaagcttgatcctgtggtctgttacacgtccctgagggaagttgtaggtacggatcttctcggagcggtcacctgtaccgatctggcttctccttgcctctgcctcagcgtcatgctgcttggcaagctccatctcatacagacgggaacggagcacacgaagtgctttatccttgttcttaagctgagacttctcatcctggcaggaaatcacgattcctgtagggatatgagtaagacgtactgcggagtctgtggtgttgacacactgaccaccgtttccggatgcacggaacacatcgaatttacactcattgagatccagatggaaatcaatttcttccgcctccggcatgatcgctaccgtacaggtagaggtatggatccttccgccggactctgtctccggtactcgctgtacacggtgaacaccgctttcgtatttcagtctggaatatgcaccctcacccttgatcatgaaggtaacctccttaaagccgccgatgccgttctcattgaggctgagcatctcggttttccagcggcgggactccgcgtatttcacatacatacgataaatctctgctgcaaaaagtgctgcctcatcaccgcctgcacctccacggatctcaacgataacgttcttgctgtcgttagggtccttcggaagaagaaggatcttcagctcatgctccagctcctccactctcttttttgcatcggaaagctcttccttcagcatttcacgcatctcttcgtccttctcgctctccagcatggaaagactgtcctcgatggtttccttatttttcttatattctttatatgcgtcaacgattggctgcaggtcgctctgctccttcatcagcttctgaaaatgtgccggatcgtcggttactcccggttctcccagctcattgagaagctcttcaaaacgtaccagcagatcatccagtttatcaaacatgtatttcctcctgtttctgtccaagcaccacacggtcaaggcccggcagatcctttacgatctgaaccccggtaaaaccggctgctttcatcattgtactgaccgcctccccctgggtgcagccgatctcatacagaagccatcctcctggtttcaggtaccttccggcctctgctgtgatctttctgtaaaaataaagcccgtcttccattccgtcaagggccttcctcggatcatgaaggcggacttcttccatcagtgtttcaatttcttctgttgcgatataaggcgggtttgaaataaggatatcatatttcccactatcttttccacctttttcacaaaaatacggtgccgagaacagatcgctttccacaaaatccgcccggttctccacctttagaatacctgcattcttttttgccacttccagtgcttccggtgaaacatccacaccggtcccacaggcatcctgccgttccagaagaaggctgagcaggatgcagccggagccggtacacatatccaggatctccggtttttccacatccccaaggtgtttcaatgcctcttccaccagagtctccgtatcctgtctcgggatcagcacgttttcgtttacataaaactcatagcccataaaaaaagcctgatgagtcagctgctgtacaggaatatgtcctgcccgcctgtcgatcagcgtaagatactctgctgcggtctcatcagacaccggttcatctccatgcgcaaaataatatgcccgattctttccggtcttaaattccagaaggagccaggcatccagcccggcttcttccaatccgttatctttcagtattgttgtaccttttttcagaagggactcaagagtctgcattttctgtctcctctgtctcatatgggatgtccaggtcaaattcctctttcagataagctctccaatcaaaaacagcctcaactgctttaatggctacctctgccatatctgcagcaggctcctttgtggtgaatttctgcatggcaagacctggtttactcataatgtccgcaaatttactgtctgttcttcctgcccactggatgatctcaaaggaaatccccgcaactaccggtaccatgagaagtcttcccagcagtctcacccagtaaaacggcaccgccacaaacacaaaatgcagcacaatacttaccagcatgaccagaaacagaaagcttgttccacagcgcttatgaaacctggagctctttaacacattctctaccgtcagaggcagaccatgctccacacagttgatacatttgtgctccgcgccgtgatacataaatgtcctctggatatccttcattctggagatcaggaacatatatcccataaacagtgccagcttcacaaaggcttccactatggtgaccagaaattccgaagcacctacccctcggatcagactagccagtacatacggaagaaacataaaagcagccacagaaaccaccatggagatagctaccgtaatgtaaagaagccacttgaactgcttatcctctttggctttctttgcagaacgctcttcttctgtaagctgctcattcttcctggctgtttcctcatcttcctcgtctcctgcgatctccgcagaatacatcaggcatttcgtgcctaccacaagagaatccacaaagcttaccacaccacggatgatcggtttcttcagaaatgcgtgatttccgaagatacatttataatcctctaccttcagctcgatctcctggtccgggcggcgcactgcgatagaatatttgtccttgtggcgcatcatgatgccttccatgaccgcctgtccgccgatattcgatgatctcattcattctctcctgtgcaaattaaaaatttttcagttaaagaaaggttgagatttcccaacctcaaccttctcatttcctgtattcgcaataattacttattcaggccgtatttcttgttgaacttatcgatacgtccacgagcctgtgtagccttctgctgtcctgtgtagaacggatggcatttggaacagatctcaacatggatgtcctctttagtagaacctgttacgaaagtgtttccgcagttgcaggttacagttgcctgatagtagttcggatggattccttctctcatgattttcacctctctatatatttaatattattcgtattcaattgacgaattccattttaaacagcttgctaagtataacatagctttccctaaaatgcaaggactttataaaaatttctgtttctttacagtctgtaccagttctgcattgttcctggttctggcaaaggtattcaggatctgttctactgcctcatccgctttcattccgttgagagcttttcgcataatataaaccgcttcctgttcatccttgctgagaagcagatcctctcttcgggttccggatttctggatatcaatggccgggaatacccgtttctcctgtaatttacgatccaggacaagttccatattaccggttcccttgaactcctcataaataacatcgtccatcttgcttccggtatccacaagtgcggttgccagaatcgtcaggcttccgccctcgcgcatattacgggctgcaccaaaaaatcttttgggcatatggagagccgccgggtcaagaccaccggataaggttcttccgcttggcgggatgatcagattataggctctagcaagtcgtgtgatcgaatccagaagaatgatcacatcctgtttatgctctacaagacggcgcgcacgctccacaaccatctcggaaactctcttatgatgttccggaagttcatcaaaggtagaatagatcacttccacattcggtccctggattgcctctctgatatcggtaacctcctcaggacgctcatcgatcagaagaatgatcagatgcatatctctgttattcctgaggatagacttggcaacatctttcagaagggttgtcttacctgcctttggcggagatacgatcattcctcgctggccctttccgataggactgatcagatccacgatacgcatggccgttgtaccgcctgcacgctccatgacaagtctctcattcggaaagatcggtgtcatatcttcaaaattataccgtctctgtccctcactcggatggaaaccgttaatggaagatacatagagaagggcactgaacttctctccctgggtcttgatgcggatatttccctgaatgatatcacctgtctttaaattaaagcggcggatctgggaaggagacacataaatgtcgttctcacccggcatataattctcacatcggataaagccatatccatccggaaggacctccaggatcccgttagccttttcaccactgtccagctgggtggattctgacggaacattcccgttctcccttgtagcttcccggttatattcacggttgtactctctgcggatatttgtgcttctgtgttcctgctcattcttatcactacgatattccttccgctgctcctgaagtccttcccctgccggacgggtacgatattctgttttttccgaatcatagcttttttcttttacagtattttctgccggtgtacttttgtgtacttcttcgggatttcctctgtcggactttttggcgtcctcctccagcatccgctcaatcagtgccggttttctcagagtagaaattcccttcatccctctcgcctttgccagatccttcagcaccgccagagataatgattcatacttttctctcatattaaatcctctattcttaaatctgataaattatatatttgttgtttatggaatcagatacaacctgacatggctgcactttttttgaatgaaagcatgttttcagcttatatttcattatacacaccttatagagtctattgcaagaaatatttatcgacattttttttatacttttctcacaaaaaagaaaaaaatctgcccgggagatctcttcccggacagatccaacgttcctgtatgcttcttttttagctccagaacggtccgtatatatccatgaccctctggatacgttcatcagtaattttattcagagccgccacgatcgctgcatacgtttttggtctctgtctcttaagtgttgacggacttgttacatactcaagcactgattctgcaaaatattctgaactgttctgcgttgcatagcttctgttaatacctgtaaatttggatttttcgctgttataaactgcggcaaaatcacttgttctgtctacgtttcccgcaacaaaagcaaggaaatgtcccagttcatggtagattgtctcattctcaaaacgaaggatgatgcttcttgaatgtgcgttaaagcagcctccgtagttaacagacggatcgatcgttacagtaaatccaagcttcttgtaggctttgagcaccctgctgtccatcttcggtgcaatggaagcaatattgcttactgaatatttgctgtccatgttgatgctttctactttttttgtggaagctgcattcgctttgccggcagtagctgaagccgccatgactgttgtggtcgtctgaatggttgtagttactttccgtgtctgaacggctgtttttgatttctttgtgtatttctgtgttgttgcagtcttaactgtctttaatgtttttacggttgtatttctgtttgttttctttgtggtcgtactcttcttattggtagtcggaagcttcttggtataagtcttggtcgccgcttttttcagcttaactttttttctggttgtcttggtatttgaagtcgttttggtagtcaccttcggttttgaagcaagtggagtgtcgtcctctgtgatggtagtctccattaccggatctgtaaaatccggaaattccggaacctgtgacgactgccagacattaaagccacctgccagtacaataacagctgcaaggcatcctgctaaagcttttttcctgcctgtaaaaattttacggatatctgttcttttcatatcattcacacctttctgaaagccgacgtttcagtttccaacctaaaccggattttaggcatcaaaaaagccgcttattctaacgaaataaacggccgcattaacacacagattcttgttcatagatgttatctgaatacgtcattaaatcggaatttaatgcggcaaccggctgtcatagtcatccttcggaccttagacccatggctttgcgtccctgtctttcaacaggtttgcctttatatatagagtatatgtttttttccctgaaatgtcaacattttccactgcattttgagccctactcctgtctttttttcacggaatctgctatactgttcaaaaagaaagcatgatataacaggagaacggaaacaatgtcaaaatttttaccagtccgtctcttttttgtatggctgcttttcggaatcctgctggcaggctgtggaaattctccttcctccgatgaagaacctccggtatattctccgaccagagtcctcaccccggaggcccccggcaaaaaaacactgggcagttcccctctgatcctggatatttccaatcaggatcaggggtatctgaccgcagaatccgattccgatgattcccgcatgaacattcagcttactgctccctccggtgtggtctattcctattttctggaacctgatgaacagacggtacttcctttttccgaaggctccggtgagtatctcatcacctgctatcagcaggttgatggaaaccagtatgccgccctttacacggaaacgctcacaataaaacttcagaatgaatttcttccgtttctgtatccaaaccagtacgtggacttttcttccaaaagtaaagcctgcaaactggcagcctctcttgtcaaagaagacatgaccgatatcgacatcctgaaaaccttctatgcatatgttaccagtcatatttcctacgattatgacaaagctgattctgtcgaagccggttatcttcctgatgtagatgatactttaagcaccggcacggggatctgttttgattacgctgcactgactactgcaatgctccgtagccaggacattccctgcaagcttcagatcggctattccggtgatgtaaagcatgcatggatcgatgtttatatccgtggcagaggctgggtgacaaaggcagtatcttttgacggcgacacctggaagctgatggatcccacctttgacgccaacagtgatggtgatgaagcgatccaggaatatatcggtgatgaaagcaattatacggtacagttcacgcgctgacccactaaaggagaccttattatgaaaaacaaactgacagcccgggaattatccagtttctgcgggcagatgggaatgcttctgcattccggcatatccacagcggaaggacttcacatcctctgtgacgaaagcaagaccgatgcagaccggcagatcctcacacccctgatccgttccgtggaagaaaacggttctctttcccgggctcttgacgaatccgggatctttcccacatccatgaccgcctatgtccggaccggtgaggaaaccggctgcctggatgagatcatggaaagtctcagttcccactatgaacaggaggaagaaatctcaggacagatacggtctgcagtcacttacccgctgctcatgcttggcatgatggctgttgtgatcctggtccttctgataaaagtcctgccggtatttcaacaggtatttaaccagatgggaatggaaatgaacggggtttcccggggacttctgaatgcaggcaacgtaatcagccggtattcctctgtttttctgatcctcgccgcagccctcattggctgcatcctgtttttcagtcttacggaaaaaggtcacagccagctgcgaaaaatggtcatccatctcccgtttttccgtgagatcccggttgccatggattacagtcgtctgacccagggcctttccctggggcttcggagcggactttccccggaaaccagcctggagcttacaaaggatctgatctcacagccggtgatactcgaaagactccggaaggcttcctctatcctggatagcggagaaactttttccagggcccttacagaatccggtctgttcggcggcatggaaggccgtctcatcacgatatccttctattccggttccagtgacgaaaccttccgcaggctttcccggcagtacaccgaaagatccatagatctgatctcacaggcagtctccattgtggagcctaccatcgtgatcctgctgtctcttcttgtggggttggtccttttatccgtcatgatgccgcttctggggatcctctcagattttgcaatgtaaggtggtgaccgcatggaactttttgaaagccgcagaacaaaatttctcagagcattttttcttctctttccggcgctgcttctggttttatcctgcaccttgtttgtggcaggtgtcagcagcacctccgaccaggccgtacacaaagaacaggatactctggaacaggcactgaaaaacggtgccatccgcacctatgccctcacaggcacatatcccaaaagcctgtcccagcttctcttggattatcatattacttatgacaaaaccaaattcgtagtagagtatgttcctaacggttccaatctcctgccgtctatcagcgtgatcgctctgtccggcagtgcgaaaggagggaatgcctcatgaatcaccggaagaacaccggacattccgtttcttctcttttttcgcttcttcttttcggtgtttttgttttgttccttatactgatgctgctattttccgcccggatttaccagcagactgtgaaacagactgactccgattccgagcttgggaccgcagcaacttatctgactaccaaattccggcagcatgaccgcggcgatgagatcttttccggttctctggatgatattcctgccctttgtttccgggacgatatcaaaggaaaagaatatatcacgtatatttacctgaagaatgacagtctgatggagcttttcactgcaaaaggctctcaggccagttccgatgcaggaaccgtcatctcacagctttccgatttccggttttcggaaatggaaaatggtttttaccacttttctctggaaagtaccacgggagtccgctcggaattcctgcttcatcgcattgacaaaaaggaggcatcatgaaagaatcaagacataattccggtaccagcctttttctgatggaaatgatccttgcccttttgtttctgtcactttcctcagctgcctgcatccagatcttcgcggcagcacggaaaaaccggctccaggcagaacagtggaaccagatccaggctctcacaacctccgtgggcgagatactggaaggcactgacggaaccgatgaacagttcctctctctgcttccggggggcatcaaaaagaacaccaacctgatctggtattatgaccgtaactggcagagctgctcttccggagaagccgcctgtgaaatgatcctggaaacagatatttcttcttcagaaaaatccggcgagctttctttccggcagctttccaactgcagtgagctttaccggatcaccctgcgttttcctgtcgatgactacagaagggaggctgtacattgaaacagaagcatacgttttttgtaactgtcggcattccttccctgtttcttatcttctctgtgctgtgtctctgtgtacttgctctgcttactcttggaagctccagatccagtcttaacacagccagacattctatggaacagaccgaaaattattacaccggctgcgcaagcgccacggaaaccgtttcagaaatccgtgatgatctggagcaatacagggaaaaagcttccgatgagaccagatatttttccatgatacaaaagcttgcgtacacaaggaacgatctcagctgggattcccacagccacaccctttccttctccgttggaatttccgagacacaacagctttctgtagtgcttgagattttttacccgcaggaaaaaagctcttccgcttatcagatcctgcaatggaacacagagcttaccggatcctggcaacctgacaaccaccagaatgtatttaaaggagaataaacctatggatacccctattcctgaatttttagcagaagctgccaaccggcgtgtctctgatatctttatcatcgcaggccgccccctggccgaaaagatcgacggtcatcttttggaccgtggtgacaggctgatgcctgatcagacagaaaatttactccgcaccatttacggccttgcggaaaaccgcgatatatcccgtcttatggaaaccggtgatgatgacttttctttttccattcccggtgtttccagatttcgtgtcaatgcctacaagcagcgtggttccctggctgccgtgatccgcgtgatcgccttccggctgccggatcctgcagagctttccattcccgaggatgtgatgaacatctccgaatatacccgtggcatggtccttgttaccggttctgctggaagcggtaaatccaccaccatggcctgtctgatcgacaggatcaaccatacccgggaaggccacatcatcactctggaggatcctctggaatatctccaccgccatgatcgctgtatcgtcagccagcgcgagatctgtaccgacaccgaaagctatctgacatctcttcgtgccacactacgtcagagcccggatgtgatccttcttggagagatgcgtgatcatgaaaccatccagactgccatgaccgctgcggaaaccggccatcttgtcttttccagcctgcacactctgggagcagccaacaccatcgaacgcatcatggacgtgtttgaaccatcccagcagcatcagattgccctccagctttccatggtccttcaggctgtaatctcccagcagctgatcccggatgtggacggacgcaacattcctgttttcgagatcatgcgcctgactcctgccatccgcaatatgatccgcgacaataaagtacaccagatcgaaggcgtgatctccacatccggtcaggagcagatgcgttctatggaccagagccttctggaattatataaaaaaggccgtatcaccagggatacagctctgaaatacgctttaaacgcggacatgctgaagcgcagacttatgtaaggatcttctcggtatacttctgcctgatatgtaaaaacacataaaaaatcccttaccgatctctgatatgtttcctgaatacagaacacatatcattttacagatccggtaagggatttctttattttcaatccgatttcgaccaaaaagacattccttctctgcgatcgatcaatgcactacatttcctacaattccataagaaacaatatacataatggcacttgccataaaaagtccgcacaggatcgcaatggaggattttttgatatccacctcaagaagagaggcgatcagtgcacctgtccaggctcctgtgcccggaagagggattcccacaaacagcaaaagtccaagaaattcatatctcttgatctggtcactctttcccatagctctgttttccagctttgtgatcagacctctgaacgtctttgtttttttcatccatttaaagatctgccggataaaaagcaggataaacggaatcggaataatatttcccacgatacagatcggcagtgccttcgcagccgatatcttcagcaaagaagctgccagaaggccgccgcgaagctccagtatcgggatcatagaaatgatgaacacagctccctcgggagagataaactgtgcaaggtggtgtgaaaaccattgtaccagtacttccatagtacctccttaactgttatttctgcagatattccgtcaggaattctaccagctttttcatctcctcatcggtaccgatggagatacggagatgattgtcgatcctgtccttcgggaaatatcttacatagatatgtttctccctcagtgctgcgaaaagctctttggccggacagctctcatgtgtggcaaagataaagttggatctggaatcctggaaggaaaatccaagcttcctgagctctgcctttgtccactctcttgttgtaatgatcttatggcagcattcctcaaaatataccttatcctccatagatgccacaccagccgcgatggttgtacgatccatggtataggagttaaaggaatatttcacatcattgagatatttgatcagctccggatttccgaaagcatatccgatacgcattcctgccagggatctggacttggagaaggtctgtacaacaagcagattatcatatttttcgatcagcggcagtgcggatgctgctccgaaatccacgtacgcctcatctacgatcacgatactctccggattctttgccacgatctcctcgatctcagaaagaggcatttccacgccggtcggtgcattgggattagggaatacgattccgccgttttcacggaaataatcttccttacggatatggaactcctcatctaatgccgggcgctcatatgggatccttaaaagatctgcccatacatcatagaaagaataagtgatgtccgggaacaggatcggtttctctgaattaaaaaatgtgagaaaacacatagccagtacgtcatcggaaccaacgcctgtaaatacctgctcgtccttcaggccgtagaacgcggcaatactgtgtaccaggtctcctgctgtcggatccggataaagtctcagggtatcggcatcaagggccttcagcgccttctccacacccggagccggtgaatatggattctcgtttgtattcagtttgatcatgccgctctcatttggctgctcgccaggagtatacggcactacttttcgtatattagcttcccatggtttcatgctgtgcttaacctcctatcatattcttttgctattgtactcactgagaggacatttgtcaaagggtaataccacctgccgggaaacaaaaagacacccgtaccgggttacagagtacgggtgtctgatatattcttcttaatgaagggctgttttggttcgtatcaggcgcttaagatcagatacgtgctacgcctgttgcttttgctgcctctgctactgcttttgcgacagccggtccgactctcttgtcgaatgccttcggaatgatatactccggagaaagctcctcatctgtgatcagatctgcaagcgccttggaagctgcgatcttcatctcatcgttgatatcacttgctcttacatcaaatgcaccacggaagattccagggaatgcaagaacgttgttgatctggttcgggaagtcacttcttcctgtggagataacctttgctccgcctgcttttgcgtcatccgggaagatctccggtgtcgggtttgcgcatgcgaagatgatggcatctttgttcatggtcttaaccatctctgttgtaactgctccaggagcggaaacaccgataaatacatccgcgccaaccagcatctctgcaagagatccctgtttcttctgaaggtttgtgagcttgctcatctcttccttaaccgggttcattccttctgtacgtccctcatagatggcaccctttctatcgcagagtgtaacatccttgaagcctgctttcagaagaagtctgcagatagagatagcagctgcacctgcaccgttcataacgatacgaacatcctctttcttctttccgacaaccttcagagcgtttgtcagacctgcaagtgtgataactgcagttccgtgctgatcatcgtggaagatcggaatatcacatttctctttcagttttttctcgatctcaaagcatctcggagcggagatatcctcaaggttaacaccaccgaaggatccggagatcatgtaaatagtatttacgatctcgtctacatcatggctcttaatgcaaagcgggaatgcgtctacatcgccgaatgccttgaacagtacacatttaccttccattacaggcataccggcttccggtccgatgtcaccaagaccaagaactgcggaaccgtctgttacaacaagacacatattccatcttcttgtaagctcgtaggatttattgatatctttctggatctcaaggcaaggctgagctacacctggtgtatatgcaagagaaaggtcgtctttattctcaaccggcactcttgtaacaacctcgatcttacctttccaatctccgtgcagtcttaatgactcttttgcataatccattttcttttcctccttggataattatgatatatttcatttcaaaaggattacctgaattaataattaccattgaagaatttactgtccttcggaagctcatagccttcaaaataagagccaaaatcaagcttcagataactgcagagatcagcaagctctaccatggtattgtcgttgaccggaatgccattctcttttctgtctttttcagcagctacctctttctcgccgtgtgtatagatcctgtcctgaccgtctgccttcggactctcccgaagcgcctcaagatattctgaaaaatgcttgcggatcgcatccggatctccgaatgccgccgggttgatcgccataaatccatggcagataccggtcttgtccgggaatgtacagcatttgtcggaggtaacgcccatggaaagaatagagctgaacagctcacagagcattccatagccatatcccttatggcttccgctgacttcctcgtttccaccaagaggcatgattccgccgcccttcttggctacgatgtttgcaagtacatccggtgcattattgctggcatgaccgtttttgtcaagtgcccagccatccggaagaggcttacccatcttattatacatttccagtttacctctggttacaactgttgtggaacagtcaaagaaaaacggatacgggtctgcaggcatagcgactgcgatcgggttggagcccagcatagcctttcttccaaaagtcggtaccatgatcgcctcggagttggtacatgccattccaagaaggccttcatggcaggccatgttcgcataatatcctgcaataccgaaatggttggaatttcgtacacttacgattcccacaccagttgtctttgccttctcaattgccttttccatggcaaaatggctgatcagctggcccattccgttatgtccgtctatcacagcagaaatcggtgtttcaaaaacaacttccggtttcgcctggggatgaatagtccccttctcgattcctttatggtaacgaaccattctctgcattccgtggctctcgatcccatacagatcagcagtcagaagaacatctttaatgatgcttccttcttcctcagaaaagccaaacgctttaaaaacatctccgcagaaatggttcagtgtgtcataactccattttacatatcccataatcgcaagtcctttctcctgatatttccggcaggttaccgcccacgctgtggcctgctgcatactttatataatactgcaggggtacagtaaccttcatcctgtgctgtctcgtcttatgctgtcctgcctcatgctatcttaccttacgctgtctagtctcatgctgtcccaacttacgctgtctcatcttatgctgtctcgtcatgaagccttcaggatgctgccataatatcaaacttttttggtattaccaatacagtccctattatagcacgtggtcttaccaaaatcaatagtggtcttaccagattaacgggatttttactgaaattttatttaattttttcaggtggatcagcgatgaaatacaaggctgttctccccctgctgctgcgcaatctccagtatatatttctcaatggtttccatatgttcgcgcatcagcttctccgcctggttccggtctccggaaataatggcttccaccagccttctgtgctggtcatccacctcaagagcggaattatgtttctgcataatataggctcgggtgccggaaatgatctcctcagtcagctgcgctgccgcatccaggacattgtagatcataggattccctgcgatcctgccaatcttcgtatgaagcttcttatcaagacctgcacgggctttctcgtcctctgagctctccagctgtgccaggatggaacgcagatctaatgcatccttctccgtacaattcccggctgcaagaagcgcagcctcctgctccagcgcagaacgaagttcctgtacctgctgtacatggctgttattcagctgaaaaagaagggccagtggtgcagaaagccactgatccatattctcggtaatatagttggctccgccgcggaccgttgtgacaattcccatcagctccagtgcccgcaggacttcacggacagcaggtctggaaactcccagtgattctgccataacacgttccgcaggtaaagtgtcccccggcttcagttctccccgccggatattttctatgatctgcgctaatattccgtcaaatgctcgttcttctgtaatctttgtaaacatgtcgtccgtttcggccgccttcctttattattgtgttgccttcctttacataaaaatcccggaatatagacaagtggatatttaccattctcagtcatcatgcagttctgcaccagatgatcgctctgcagccattcagtcagtctgtgcattttgactatttgccctctctattttccggacttttatagtaaatattatacgataattccccaatttaatcaatagtaaataataaattggtaagacatattattttgttactgtccactggtaatattccgcgaggtgttttttgtgaacgaaggtcacagaaaacccgagacataccgcgcgaatttatgcgattagcataaattctgtgcatcgcgaagcgtgttactgagaacggagtgaacagtaatattattttattccattattgagaatgttttccacttcctccatctggcccagaagcattttctggcggtcgtcaaaaagaagacctttattatgcctgtaatactggtcagaaccgttctcccgaatgaaccagagactataatagttggcattcagttctgtgataaatgccaccatttcctggctgtctccaaaagcagcttccatgaagtcgaaaacgttctgaagagtaaaggatatttcgtcagttcggttttcgtaggcttcggtttcggattcaaagagggctttcacaaactcatagttccggtttgatgatggaacttccgattctgctgcggcacttccgcctcctgccagctctgaacctgatccggttttatctgatccggttgattccgatccaattgatcccgaggttgatttcaatccggacgcattttcaaaaaatgacacaacacgtttctgtatacgctcctgctgttttgtaagaagctcactctttttgtccttttcaagatccgcctctgctttttccatgagattttttgctgtgaggctgtcctgatcttctctgaagtacaccatataatcatacagtttcgtgaggtaggcatcggtaagatagcattctgtaaaaagctcgctgagctttccgttgagaaggcttacaatgctcaaatgctcgtccagagaggctgtgcggatcttacccagagtaatgggatcccactttcctttcaggatgtcctccactttatagtccgttctgtatttataataaagagccagatagcctgcaaaatccttcgcgatcatcctgtgctgaatgtactgactgaccacctcacggtctacggtttttccaaggatctcataaacctggatcagacgggaaagatcctcccagcctctggctgtggcaaagatctttccgtctacggtattctccaccctgtagaaattttttctgcgaagctccagataggagatcaccgccggatgaattccctgctgataggcatattccttccatacatcaaagtctgcctccacatcgatcttcttgatacggtccagagtgaccacatcgaattcccggacggatttgttatattctggcgggttgcctgctgtgacgatcacccagccttccggcaccttctggtttccgaaggtttttccctgaaggaactgcagcatcatcggcgctagtgtttcagatacgcagttgatctcatcaataaacaggatgccttctttcagacctgttttttccattttgtcgtaaacggacgaaatgatctcactcatggtatattccgtgacagaaaattcttcctcaccataattcttttttacaataaaaggaagtcccacagcactctgcctggtgtggtgggtaatggtataggaaacaagagcaatcccgcattcccttgctatctgttccataatctgtgtctttccgattcccggagggcccataagaaggatcggtctctgtcggatcgccgggatccggtactcaccgaattcgtcctttgaaagatatgcttctatggaatctctgatctcctgctttgctcgttttatgttcatggtattctccttttcacggcatataaaaaactgcctgcaggattctccgcctaaaacgggttgccttgcgcgacatctacaaaaaatatgcctgaatccaatgataaatcgaaaattgaattcaggcaagtttttcactactatataattttttttattctgctgtcagtgtgtgtatcaggttcagaatacgtcccgcagacattctgacaacttcttccgaaagctttccgtcttcaaaagcttttcggatattttctgcatcggctgcattaccaggcatgataatatcatttcctgctgtcacgcatttccacggaatacttccatcttccggaaccgttgtattccagtctgacatgatcacaccgtcaaatccccattcttttcgggcaatggctgtacagagatcaacactgtttgcagcatggacaccattcagtaaattataggaagacatgattgccactggtctgctttctttaactgcaatctcaaaaccacgcaggtaaatttccctcagggcacgttctgatacctgtgcatctacgcccatacgattatcttcctgattgttgcaggcaaaatgcttaacggtaacaccgcagccaggtctgctctgcactccttttgtcatggctgctgccatggttccggaaagcagcggatcttcggaataatactcaaaatttctgccgcacagagggtttctctgaatattaagaccaggtgctagccagagatctatgtggaattcttccatttcttctgccactgctattccaactttttccacaagggcagtatcccaggtctgagccagtgcagttccaaccggaaatgccgtacagaactgataatatctgtctgcgttttcgtgagtctcatctgttctcaggtatccgttttccagagatccaaggacaccgattccatatactgtgtctgtttctctgtctacttcataattctgctgaagtctcagtcctgccggcccatcggccatgatcagtggggaaacgccatattgctcataaagagcagccgtggtctcaccggcagagccaggaacacggattcctgccgcccccagattactggagattccagcaatattcccataaaacagcgggagcagatcctttgcaggaatcttattttccggttggcaggtgcattctgttctcttctctggttcaggataatagatatatcttccaatcttctcattctctgccttctctttccatttcagagttctggcagaaagattctggcggtcataaacttcttcaataatatcagtctggttctcaaggatattcgttttatccaggatcacactctccggcacttcaagcattgcagccagcgtaagcgatgcaatgctgtttccgacccagacagcataataacctttttcagcaatccaggcatgctgctcttcggaaaaatatgccagtgtctttctgtcgatcctgattttcagcagttctttttcccccggcttcagaagttttgtttttgcaaagccagccagtcgacggtattccttccctgattcatcctgtggaagagacacatagacctgcacgacctcttttcccgaaaaagtttctcctgtattcgttacctctgcttcaacttcaacgccatcccctgatgttttcatcccatggaagcgtatctgcatttctgtgtaagaaagtccatatccaaacggaaacagcggttttacaccaaaagtatcaaaataacgatatcctgtataaattccttccttgtactcttctctttcaagcttgccattaagatagctgtattcctctgcacacggataatcctcataccttctggcccatgttgcagtcagcttgccgcctggagttacctttcccagaaggacattggcgagggcaagtccgcctctttgtccaagctgggaaatattcaggacagcacagatattttctgtttcttccagaatatctgtcagttctaccggaccgccggaattcaggataagtactgtaggaatcttctgtgcatcaaggaaccggatatcctcccgctcccgtctgctcagataataatctccctcgaccctgcgcctatcctttccctcaccggaaatcctgcttactacatagattgctgtctgggcatcgacagtatcttctgctgtgactgcacggccttccggcattgcaaagggattttccgcataggcatcaaaaggattttccacaaactttgcttcttccagtattttttctttccatgcccgacgtgcttctgcgtatattgactcataattggccagccatttctcgcttacgatctgaataccgttttctttcagtccctgataaatagaaatgttacttctgttattcacatcaccggaacctgttccgcctttcactgtctttcccgcaccggcgccgtataaacctattttcgtggaaatattcagagggagtatttttttatcatttttcagcagtacaataccctcctctgctgctttttccgaaagaagaccgtttcgtatttcacggtctgacatgctgtgtttctttgttccgctgtgtttccatttcttaactgtcatatcttacctgctaccttttgttattcttttacgcctccaagtgtcactcctgcgatgataaacttggaaagaaggagatatacgataatgatcggcacaatggcaactgtgatcatcatgtaaatcttacccatatcaaaattcatataatctgctccacgaagtgttgcaatcaggattggaacagtcatcttgcttttagactggataaccagagcaggaacgaaataattgttccaggagcctacaaatgtaaaaatcgcctgtacagcgattgccggcttcatgattggcagtacaatactgttgaaagtacggaattctccggagccgtcaattctggctgcttctaccagtgacatcggcagtgaggactgcagatagctgtacataaaatagaatacggccggtgacgcaacagacggaataatcaacggaagcagggaatcatataatcccatctttgtgatcagacgaaggaagcccattgcagttacctgtgtcggcatgacgaggatcgccatgataaatgtaaacgctacattccttgccttgaaatcataggcataaagaccatatgctgtcagtgaggaaaaatatgtacataatactgcactgcatccggacacgataatactgttaagaattcccctgaacatcggaaagcttccgtcatttgcaacattcatcaggtttttccagaaatattttccaggaagagcagaaaatcccttctgaagctctgcatgagaatgagacgcattcacgatcagtacataaaagaaaaagagacacataaaggaaagaataataagtaccacatgtgccacgatacttctgatcctgctggctgtcttatctttcatcattttgtttttctcctttctgctcttgctctctttttcgctgctttcttagatccgtccggatcattgtcgttagtcatacgatatacaaagaagcagaggattgcactgataataaacaggtatacagacaatgctccggccataccataattcttgctcttcagatggctgttcaggaacataatcagtgtcatggatgttctgtccggattaccctgtccgtttgtgaggatctgcggtacatcaaacatctgaaggccaccgatgatggaagtgatcagagtataggaaagaatcggacgaatcagtggaagcgtaatatagacgaaacgctgaatgctgttgcatccgtccagatccgatgcttcaaaaatatccatactgattcccattactgctgccatcagcatgatggtcgtgtttccgaaccacatcaggaaattcatgaaacctaccaatgatcttgttcccagaacagagcccagaaaatcaatcggttcctttatccagcccagtgaacacaaaatggagtttacaggtccgtttgtggaaaacatggtaaaaaacagaagtgcaaatgctgatgccatgatcaggttcggcagataaattacaaccttaaaaaactgcttgccatgaagcttcagcctggcatcagtaaaccagcatgcaagcaccagtgcaataacgatctgcggaacaaatccgatcacccaaaggatcagtgtattcagtccgtatttcagcatgtcagaatgcagaagactgacataattggcaagtcctataaaattaggaccaatctgcttgattccagaacggaaatattcaaaaaagctgtatctcactgtatcaaacagcggaatcagcgaaaagataaaatagatcacaaaaaacggaagaataaatatgtatccccattttccgtaattaacgctctttttcttcataatgctcttcctttccagcaagctgcaggatccaaagatcctgcagcatcaacaattatcctcatgtggtatttattccggccactggatctctgtgatctccggataacgctcctgaatagctgtctcaaagttggcttttgctttgtcaaagtctactttaccctggaagtaatcactgaaagcgttctggatcagctctacacaaccctggtcatatgcggaaagcggtgcgatcttgatattctctgcaaccggtgcaaaatactcaaacgggttctgtccaccaaggaaatcagatgcgaaatctgcatttgtagctgcatctttcataccggattttgtatttgtaaaatcagagtattctttggaaatcttaagaagattatcctgatttcccgtcattgccaggataatatctttgacatgttccggattatctgttcctgttgcagcctgaatgtaagagccaccccagttgtattcctgcggaggatttgtaacagcccagtcaccttctgctccatcccagtttggtttcagagtaaagtcgataccccatgccgggaagaggaatgcgaataccttggactcagaactcattgccttgttccagtcatcgttccactgaccttttacagttttgttaagataacctgcatccagccactctttggaatcttttacccagtccatgatctttgaatctactttgatcacagaatcaccggactctacccacggattctcaatgctgtttccatataaacgaaaagtgtctgcataagaagcaaatgtataatatcctttttctttcagctgagctgctgtttctttggctgtatcccagtctttcatcttctcgccaacttctttcgggtcatcagtaccgaaaacatctttcgcaatgtcacgacgatatacaaggacacccgggcagcactgccatgtggcgcctctctgtactccatccgcatcagaagctgttgttttcgtgaaatcatactgatctgcaagatccttgtccggatcaatgccaagatcagtaagaggcattgcaacatctgcatctttgtctgtatatttgaatacataatctgtctcagaaaggaacatgtctaccttatcatctgcacttgcatcagcctggttgagaagtgcctcatccagtttctgctgatatacgccatcctggttcggatttacgatccagtggatctctgtaccatctttcagttttgtaactgtaccatctttggaagtggactctacttccggataaatagcttccagtctctgacggaactcatcattccaggaataaatattgatcacttttccctcatccgatccttttgcagatacacagcttacatttgctgccatcattccacaaaccattgctgctgcaaggatcatagataccgctcttttcttcatagtataaatcctcctttttctgtagcatccccgatgctttacctttgatgataaaaatataccatttttttatctgcgattatattattaatcttaacaaaatgtcaaattcatgtcataatataaaaaaccaacgcattccttaaacatcaacatataaggaggatatcaatatgtccatttcccaagactggattactaatgaactggaagatacagaactggaagctcttcatcgctctccctctgtggaatattctttttacaatgccgtaagagccggtgatatggaagctgtaaacaaaaactgcgaggaagactcttttcttcatctgaagggaaccggtatcctctccaaaaatcctctgaccaacctgaagtatcatttcgttgtcactactgccatgctcacccgttactgtattgacggtggactggagcctgaacaggcatatcgtctcagcgatttttacattctgaaaatggattcctgcaccactgtacgccagattgcagatctgcatcatattatggccagagattttaccggaaaaatgatcctccagaaaaaaagctctattctttccagaccggtcatgcaatgcgtggactatatttacggtcacattaaggagcgtatcaccattcaggatctgtcagaacataccgggctttctcccagttatctgtccagagtattcaaacagaatcttggagtatccataagtgattacatccgcgagaaaaaaatcgaaaaagccactcacctgctccgatactctgataaagcagtagttgatatcgccaattatctgaatttctcttcacagagtcattttatccagatctttgaaaacttcaccggccttaccccaaagaagtaccgtgacaaatattacaaatcaatgtggtaaacctctttattattatggctgatattttttatcagcaccaaaaacgacatcccgcagctttttacaactgtgggatgccgttttcctattgatacttctgtttctgtaatttaacaattatgtataaccgatttcggttacatcagttccactttgatcctgtgtgtttcttttacagaaagcttttcgagcagttcccgatctatacgtacacaggtactctgtttgtttttcatttccttttcatcgcaccatactgtttttattttatattctgaaggaagttttttctccagattgcagatacagatctccagctttcttccggcaaattccatagtaagagatgcctgtccattctcattatactgctccggcatcagtgccggcgcgatcaccagatctccaagatctcctctgacgccaaatacctctgtgatcatagtcagcatataccagcttgcagcaccggtaagatatgcatacaatcctcttccctgattatcaaaatattccggaattccaggatacatcctgctgttctcaaaatccatggcagcgtccagaagcgtttccagaaccttatgtccttcttttgcatagccgtttttatacagtgcattgccatacataacagccatatgggaaaataccgctccgttttccttttctccataagcaaacccgaacattcttcccagatcaaatttttcttcatggaaattggtattcaggcgatatcctcctgcctgacggtcaaaaagatatttatccgcacttttacagatagactcaatctgatctttctgtgcggttttactcatgatcgcaaatacctgactggtaagcatcatacgtacctggctgttttctgccctttccacaggacgtttatgatcatcataatatccgttgaaccagccgttttctccgtcttttacccattctcttctgcggatgttttccatcatccaatctgccttttcatccagattccggctaagctggtccagacggatcacaatagtatttccgctgatatcatgtgcacatttttctgtgtactgtctcagaagctgctgttttttctccgggctttcataaagctcacggtctccggtaaacaggatttccatttcttccgcaacttcaatcctgtcaaacatttccttttcctgaagttttctcagatattctgcgatgttcttcatatttccagcatatgcacaggtaaatgccacactctcaccattttcccatgccatatccatggcatcgttccagtctgccccgtgaagtttcatctcgttgtgctctcctacatcataaaaagcacagagattttccagcaaaatgtgttccagaaccgttccgtaataaatctcaccggattctgttttctgattttctccataggcactgctccatttttcatcatgcgcagttcctctttttgtctgaagatccttgaaatatggaatcttctcaaaaaggacattcatatccccggtctgatccatataaagctgcgttgtcacaaatggccagaaagcatgatccatccacacgcgggcaatgttgttacggtctgcgataaattcaccctgtctgtttccgatgatcgtggcattggttccatcgatgcgtactccaccgtaattatcgacgatcatctgacgtacaacagaaggatccatgatcagaagtgccagacagtcttgccaaagatcacgccagcctcttccaccttttccataatcatgatacgggaggaatgaacaaccgtaaattcttcttaatatcggctggaaacagatccatttcagataattatctctgtcctcatcacctgtctcaaaagaaacgttcactttttctgtccagtgtttttttacatgttcaaattctcttgcaacctgtttttcagttctgtaaaaccgtgcagtctcctccggcagctgatttttttcagatattcccgctgtcacaacatatacagctgtttcatgtggtctcagaaccctggatgcaaaacgaataccaccgacagattcctttccttcaatttctgttcctgccggaacaccttttttctcttctctgaccacctccggaatcaggaaagaaccgccttctccgataaacatttccacatcaggataaaagctttccggttccgttccctcgccttcagatccatatacaaaatatgcagtattattcttctgatgacctctttcatcaaaagaaagcaccggttttacttcaacaccgtactccgttgttcttatcctgtgcaaaagggaagtcacatgcctgtgatctctgagattgtctgcacttcttccatatacaggtattacagcaaccgatgtgatctcctgttcttcctcttcaatattcgtaatctttacaagatggacctccgcatcacctttcactgtcacaaaagacaaaatctctgactgaagtccgtatttctcagaagttctgtgcagcttctgccacataaatccggcttccaggctgcttttatcctgtttatcagtatatttctgaaattcctgttctgccgaaactccgcatgctgaccagtaaccttttccttttatcttgcaccagaaatttctggtgtttcgattattatgaagattctcaatgcttaccggttccagcagaaaatgattctgatccagtttgctgtctcctcccagagaaggggtgatcgcggatttcaatccgttttctccggccagaggtatatataaaccgctgtaattctccggattttctatggaaaaacttccatttttatcctgaaattttatatatttcattctgtgatctccttcctgccaaaataaaacggtatttatattccattttactttgtattcataaatgtgatctcctcgcaatttatatccattatgtcatgacatatagaattcaatttctgtctcaccggtaagtttctcctgcggaatataattacccggaagttcttctccatttacatagagttttttacatccggcttccacatgtcccggattcttcacagtgatatggagatgacatccacggaaatccttgcttatctcaaacttctcccattcttttggaatcgatggtgctatacgtaagccatagaaatccggacgcatgccaagaattccttctacacatcctaccatcacagtagatgctgttcctgtcagccagtgcacatgagatcgtccgaaattcgggcttgcttttccttctgtaaactgtccatagcagtatggctccagctgtctgatctcagccctgtcattctgcgctgccggagcattctccaggaaataattaaatgcacgctcaccatgtccgcaaagtgcttctgccagaatgagccatccctgtgactgtgaaaagattcccgcattttcctttgttcctgcattgtagataaccgcaagtgctccgtcgaaagcatttgcatgatatggaggatccataaggattgcaccgtattctgtattcaatctttcataaaccatttgaagggccagatctgcctgccgctctgttgcaaggccgctgatcacagcccagctctgtggattcagccacatatttgcctccgggtcagttctctttccgataacctctccccgctccgtaaacccacggataaaacgatcttcattccaacagagttcctggatcaattttccaagctgctcttgtttttcttccaggtattttatatatttttcatcttttttgtactttgcaaactctttcaggatagtcattgcataatagaactgtaatgcaacgaaagtagattccccatcctttccaagtctcagacaatcattccagtctgcataaagtccggccggcattccatgtctgccaagatggttcatggagaagtcaatagctcttttcagatgctcgtatacagttccttcatccttgtttgcaaacgggatcacttcatcgatgaatgcaaaatttccagtctctgaaatatatttgtatacagtagggaacagccagagtgcatcatctgcgcggtatgccggatgaccggtttcctgtacataggacgcatcatccggtgtatcctcatgtcccggattatgtgtgaatttcacaagtggaagaccgccgccgttatctacctgtgctgacaacatgaaacggatcttatccaatgccatttggggtgcaagatggatcacaccctggatatcctgtacagtatcacggtatccatatccgttacgaagtccgcaataagtaaaagatgctgcacgtgaccagataaatgtcataaaacagttatatgcgttccatgtattgatcatggtatcgaattccggacttggtgttctgatctgaaaatgtgcaagctgtccgtgccagtaactgatcagttcttcaagctccaccgcgcatgttttttcacagtctgcataatgtgctataatctccgctgcttcattatcctccttcattcctgccagaaaagccatttcccgactttctcccggttccagagtaattacagttgaaagggctccacagctgttttcattataatttccctcattacataatacaccagcttcaacccctgccggattgttgtatccgtgatatcttccaaggaatttttccctgtcaccacaccaggaagaaaccttctctccagccaggccgaagaatcggttgaacacgttcttgttatcaacctcttccccatccttaaggccgtccagattcgcatgaatcatctgacgtacacgatctccacagaatactgttcttgtaatatactgggaatactgcagattcacctgatcctgttcataattgctgttatttgtaaactctgcatatccagtcacactgatctcacgttttctgtctgagcagttggtaactttcagattccatacctcgtaggactgcccaagcggtacatagtatctcacctctgaatgtatctcgctgtaatctgccatcattttagtataggctgtgccatgatgacattcacttttatactcactgagatctttgccaaccggctgccaggatgctgaccaataatcttttgtgtcattatccctgagataaatatatcttcccggctgatcaaactgattaaaaatatatctcaggattctgccgttcgccccggattttgcaaagctgtatccccctgcattattggaaacgattgctccgtattccggcgatcccaaataattcacccacggagcaggtgtgtccggcctggtaatcacatattcctttttttcttcatcaaaatacccatatctcatgccatacaatctcctgttctgtatattttccgtaacattgtctgttgttacctattttctacactataactgatatgcagatagcaatatacaaaataaaagattaaaatatcagattcatgacataagatatggatataattttttacaattcttcctccgtgatcaccagcttcatggcccaggccgggatatccacatcctcaggctcctgctccataaatacaaatgctgtccggtatggcggcatctttgccggaaaaagcccgtatccgtctgtaaaatacaccaggcccttaagattttcaaactcacgtttttccatcagctcttccacataagcaaaagccggacggaaatctgtacctccatcaccgtaaagttccaggctgttcatatactcctgcaattcctctgcaccggtgatctttacatccgaatgcaccttctcatcacactggataatgtgtatatttaccttctggaaaaaattcctgctatcgcttaagatcccataggtttcctccagaaatctctgtaccagttctcctgaacaggacatggaggtatcgatcacaatgacaaattccgaaacttttttcacttctctggtttccaggggttcgatcagcggcatattcccgtaaagggaaagcccgtaggtataaaaattataatcaaagctgtccggatccacagtcagttcttcccgaaatactgcaaatttccgcagaaattcccgataatcatatcgttcccggttctctattttcagctggtccagaaaatctccgtcctgctctcctgactccctggaaaaggtctccagatctgtctcgatcccatcgctgatatctccccattttttactcatcaggggattgggtttccggtcaggctgctggtttgcccagtatttatggtcgtccacatagaactctttttccagctgtgccagttctttttccttcagaaattcttctttcagaatcttgtaaattctctctgcattcagcgtcttcttttccttttccagaagacggtaggtttccctccggagaagacttctggaatatcggactgagcggtggtagatcccgtcgatcatatgctccactgcaatatcgcagcttaaattccacaaacgcttctctattcccggcttcccaaagtgccggaaaatgcagtgaaataccatatggagatatcctcgattcacaagaatcctgttttctttataaagcccgccaagctgtgccggatggaagtatatcacagccccgtctgttccaaacggactgaccgaaccatccatctgataaataaagctgctcagcgccacatccagaaaacgcatgccaagatacagctcgtctcttgccgcccggaggatgctgctgccgatgtcctggagacgctgggctgcctcctggggattggatccctgaccgggcaggaagttatttttattgttttcagttgtttctatatcactcataactgaaacttctttctccttttaacagggcacctctcattttctgtctccccggccaccttctgctcttccttcagcatccggctgcgttcattcatcagaaatgcggaaatctccatatccttcttcctggccgccacatcaatactatgttccaggccctctctgttccagagtttttcccgagaaagcagctccagaccatttaagcttccgctttccaccagaaattccccgatatccttaagatttccccggatataatcctcatactgcttcttcgccttttcactgagctgccacggataacgaagccgcccaaagctcatatcaaccagaacctccagcttatccattaccactgccatatcaaacaggctgtcatactccgcgaaatccagttctttattatagaagcattgccggtaattggtccctgagccatgatactccgtaaacagaattctcgcaggcgtattctccaccgcctcatcataatgctccggaaaaaccatatgcgcacgttttccacttgcctcaccattttcgtacagaaaatccacatcaatcttctgccataattccccaagaatctccttcgcacaggatttgattccctttttctgatggatcacaagctccttcagcccgctacagcccgtaaacgccccggttcccacctgcatcagcgtatccgaaaattccagtcgttccagttttttgcatccataaaaaatatatcttccgatttccttcagtgtatcgggaaaaacgatctcctgcacttcctccccggcaagaagtctctcttctccgaacgaaattacatcttcgctctcccaggtttctgcatcttcttctccgtccttatgtgcagaaaacgcatacggcgccgcactgactaccggaagacccttgatctcttccggcagcacgatccggtcatcggtaccataacaccgaacgatctctattgcattatttttaattctgtaatgtattttcatcgtacactttcttccctatgtcacaataataaaaatttctgtttcctattgtagacttattccaaacaaaaaacaacccatcggaccactgatggcaagtcagtatcctgcgggttgttcgtttcttttatcataaggttggaggaattgctatatttttatcggtctatactttgagttttttctcttcaggatttaaagtttcctgtaaacttccataccatatccggctgttccggaagataggtaacgttaggtctccaggtcgcgatcacggtatctttagaattgacccagaaggaatactcttccctgtaggaagtgttgagcagtcccacagacagatataacgtttcctgatccattccataagcaatgctgtgatatctctttgtaaaatcatccggataaagatcgttctgtttccagctcttaaatcctgcataagcaatctttttctcaccctggactatcatttccagacgcagtttacatccttccggaatgatctttgcactttcaatgtttctcggattttctgtaaaaataatctcccggttaaataatccactgagttctttttccgcagttttcagtctgccttccggctgtggcagagaaaggctttttatttttgcttccagatatttctctccttcttcccgtttttcttccgggcaaggtatggaaactgcttccttcatatatttaaggcagatatctgccgcaagatattctctcgcacctgcggtaatgccaatagcaaccggaagttcccggaagcacaccaaatactgtccaaatgctccttctgccgcaaagatctcttttcctgctttgatgtgatatgcataatgagtcagtgcttttttctcatctccgggaattacgactcttgactgtcccatctcttcgatccaccactgtggcaccagctgctcacccttccagtttcctttctggagaaggagctgtgccagtgtggaaatctgatctgcggtcagatacataccccagccaccggtattatgtccctcaggacttgtaagccagttgatctttccaaaaccaagtttgtcaaaaacacgtttctgcataatggacagacagttttcacccataactttggtcacgatcctggaaagtgtatagctgcatccggaatcataatgaaaaacttttccgatatcttctttcagcttaggctgtccaagccagttcttctcccagtctttttccagtctggaaaaccatacattattacagcattccggggaaccggcctgcatggtaagaagatcatatacggtaatattttccagggcttcatcatattcatccggaagatcttctctcacataatccagaaatttatcctccagatgaagttttccctcatccaccgcaaatccaacacagatacttgttccgatctttgataaagaatgcatcatctgcggctcttccattgagaaaggtgcccaggctccttcaacaaccttttctcctttataccgtacagaaatattgtgtaattctacggtgttctcaagttcctcaagcatttttgccagcttgaacggatttaattcattcatttttttcctcctctgcaggctgccatatggatgtctcgatacggattccaccttttctggtgagatatacaccaatcaggatcaatgcaaccataactataacagcagatactgcatatacaagtttaatactgaaaattccttttacaaaaataatcgtgtaaatgatgatactgatggtacagaatacgtaaagtcctgcactggaaaggtgaaatttgttcttcttccaggtatccggatatttcttcggaagacgtgaaattgcatacacaactgtaacattcataaaaaatgtgatcacctggaaaatatttgtgatcgtcacgatactcatatcaaaaatgatcggaagcaacactacgatcagtgtgtaggtatagatcaggtacggtgctccgaaacggttttccttcagaattcctttcggcagccatccatccttggcagcctgagcgatcggatatcgtacatcattaaatacaccattcaaagtagtgatgattgccatgatcggtccgccgatcataaaaagtttatacacaataccaggaaggatctcctgtgctgccggaaggattgtttccacacctgcaacctcatcgtgaggaagcaccccacctgtaaccatcgcaaggcccacataaataaaaagcagacatggcacgcaggacattgccgcaaacggaacatctttcgttgctcttttcgcgtctttaccataccacagaacattgtagtaaccatttgcggaattgataagaagaagtgccgccagcataaagcctttaaagccgccggtaaacatcttatctcctgaaaaatcaaagatcggctgtctgatctgtgtaagtccgaaaacaacatacagaaccattgtgatcagaagaaccgttgataatatcttgcttacctttgcaaaaatatccattcccagaagattcagaacaaacaggataacaacacctgcgattgccagtgctttcactgtaattcccgggaggagattattcaaatacaatcccagtgccaacgcaaaagaactgttgaggatcggcgttaccagtttcgtataagctaccagacctccggtgctaactccggaaaggttcgttacgatggaatacgggcctcctgccacgcgcatggtcccaccaagaataatatacggaaaaaccataaagaatcccatgacaatcgctgtcagataagcaagccatacagaataaccggtataagccattgccggtccgatcagagttaccattccggagccgattaccattcctactgcgatcgcaaaaagatcaccacgctcaagtatacccggtttcggttccggcttgttcacaattatgttcttgtcgttcatttcattgcgcctttctttacttttttactttttattttttattttttatattgtatacataaagaatagtgaaaaacgccgtaactgtcaataacaattaacaatttcggcgttttgtgaaaattatctgttctgtttttgtatactttttacagaaaaatggtgatttctacagcctaattataccgttgcacaaagttctcacaactgctttttatatgtttctgcatacgcagataacattccatagcatcaccttttcgaatactttctacaatttcctcatgctctttcagagattttcttacgtactcttcttcatttaccagtacgcctctggacagtccgttccacagttctgacagcatatttttaagtttatcatttcctgctgctgtccataattccatgtgcaaagtctgattgagacttgaataactttcaaaatcacctttttctatctcttctctggaaaccttgaggatctgatcaatcctctgaagatcgatcttattttcacaacacaaaacacaagcttcactttccagtgccgcccgcacctgaaaatgttcgcggatcgttttttcattcactccaagaactactgcacgtttatttcgctccagttccagaagtccatctcttgccagaatctgaaaggcttctcttgtaggtgtaatggacactccaagttcctgcgcagtactttccagtgtcagaatttcccccgccggaattttttttgaaagaattgcctctctgagattcgccgcaatcttttctcttatgggtaaagtctttattggtttaagtcccagcatgtatatactcctgttcttatagatcttttttatttagatgaatattaacagtattctattctagcatatttttactgtattgtaaattcccattaagacaggtacccacattcttgcaggagacttaattgacttacacattttataaatactggctgaactccactttctccttattcggtccctcaatagtaaagaacttcacaccattctcccagaacggcaggaaatggacttcatcattggtagtattcagtccggctgctgtcaccagctcgtggactttctccacatccttcacatcaatggcaacatggtcaatggcgccagattccatttttgctgctttgttctcgtaagtctcgatcacaagatttccaagcttcaggaaagcaaccttctcattggcagcctcgttcaccgtctggaaagcgatcttaaatcccagtgcctcataaaatttaatggttgtctcaatatcattggttggcacacctacgtgctgaactccgttcatctgatcttttaaattcatttcaaaaccccatcctttcataaatctgacatactcataaacacaatcgcttcgcaatttagattcaactctgctacagttttatgaatacgatcactttgcaattctgcgttccacctgtgcaagctccggcattgccgggatcgcaccttttttctccacgcagagactggccactgcattgccgaaacgggcaaattccttcagatcctcctgggtcagctcgtccagatgtttctctgctgtgctgactttgtacaggaaaccgccccagaaagaatctccggctccgttcgtgtctgcgatctgtttcactgcaaatcccggtaccatacagccgccatccttgccgtaaagatatgctccttcgccgccaagtgtaactgccacaactttcacgccctggctgtacagtgcttctgctgcttcccggacatccttatgatctgtcagaagttctgtctcttcatccgaaatcttcataagatccacatagggaaccaggcttctcatatgcttcttcgctgtcttttcatccggccacagagatgcacggtaattgggatcgtaagaaatcacgctgcccttgttttttactctttttaccgcataaaacgtggtatctcttgcaggctgatccgtcagggacagggatccaacatgaaaaatatgggtatgatccagcacatccacatccacttcttccttctggatcttcgtatccgctcccggttttcttgcaaaagagaaagtcctctctccagtctcgctgacttccacaaaagccagtgtagtaaaataattttcgtccaggagcatacccttggtatccacgttttctttctcaagaacagatttcaggaactttccgtgcatatcttttcctgctttaccgataaatgcagtatgagctcccagtctgctggctgcaactgcaacattggcaggtgcaccgcccggatttctggcatacagcatctgtccatcctcattgatatcctgagatgtaaaatcgatcaggatctcaccaaaggttgtgatatcatagatggatcttttcacagcatctcctgtgtccacaataaggttctgatcaagcagctgaaaaaggatcttctcgcattctttctcattatctgtatgtatatgaagctctccctcgtcaaactcaggcatacttaagacaccaagcatagacttcgcatttacaacataacggccataacataattctacatcataggggatggattctgcaatacttaccagctttcttgcattctgcattgtgcctaaaattacttttactatcatttttgtctactctcctatgcaaaatacttacataaaccgttctcgtaaccctggttttattttacatatttatgaatagtcgcctttacagctccagatcctgcgatcatctcacggaacatatcctcgatcttctctccgacaccatctttataaaggtctgtgaagaacaatctctcattggaaagaatcggcttcagctgattcttgaaggtttccggttttccgatcacgatatcgccaagctgctctgtgatctcctcattcatcgggtccggtgcaagctcaaatttgtttccttcgtcatctacagccagcatgtatctcagccagcctgcgattcccagcgggattgctgtcagtctggaagcatctccaaatttcttcacatatgcttttacagtctcaccgaaacggatacctaccatctgggacacatctacagccagacgaaggttggtatctccaagatactcattcgggaaacggtcattaaagagttcatccacaaatgcctgcggggaaaggattccaggatctgcaactaccggaagtccctcgtcataagcaaccatacgggccattttcatcatatcttcgttcgtgttcagcatatgtgcaaacagatcatagccaagtaccacaccaagagggccggttgcggaatgtacaggattcaggcatacggttactttcattctctcggaaagattgacggtatttctgtccgccatgtatacgccgaagcctttttccagagcagggcgtccgttagggaagctgtcctcgataacaagatactgtggcttctcagcattaacaaatggtgctatgtatgtcttctttcctgttatcaccggctgcatgtcttcaacgccaagcttctcaaggtctgctgcgatctgctcgcttggtcgaggtgtgattttgtcgatcatggtccacgggaatgcaaccaccttctcatccgttacataatctacaaagccatcatctacaaagcctgctttatgccattcctctgtcatagtcagcacggactcacgaagcttggcgccgttctgtgagcagttatccatagataccagagcgatcggatatttccctgctttatatctctcattcagcatagccacaagaactgccattgctccggttgccttatccggtccgtttttaatatctgcttccacaaacgggaaccatgttccgtctgctttctggagtgcatagcccttctctgtgatcgtgaaagaaaccagctgcagagatttagccgcaaaaatttctttcaggcggttccattgtccagcatcagatgactgtgctttcactgcttctgcaagtgccccaagaactttgtactcacgggttccatcaccgtgaaggatgacatttaagccaaggttgtcatatggcgcgtaaatcttatctactacgtcataatcaaaggtctctacacatgtgatacctctgtcaagaactccctcttccagaagaccatctgcaataccgccgataaatacacggaagatatttccgattccgaaatgtacccagcctggttccttcttcgctttctcagtaactgcctctacatcgtatcctggaagattgatgcctgctttctcccatgcttcacgctctttgattccttctcttgttaatttcatgatagaacctcctttttttcgttcatttcgttatttatgtcttttacttatgtttatgtcttaactgtaagtagagtataaaactttcctttttaaaaatctattggcaaagcgtctaattttactcttatttttttgtttacttttacccgttctcccctacattgcatttcccgcaaatttatactaaaatacatttaacaaatgtagcaagaattctctcacctcttcaggtggtgagatgaattgcacatcggagcatgtctgctcaaaaaaatctctatagtataaaagaaacacttgttctcccttccctgatgtagtatactgaaaagaacaattagttcataaatacatatccgttgatataagaaaaaggatgataaatataatggagttagaccatgaaagatgcattctggggtcagatattctgtctgctcagtgcaggcggagcaacgattgaaacgatacggcagtatatagaaagccagggtgagaagaatgaaccgcgccgtaaaaataaggatttatccaaataaagagcagagagttcagatagagcaaacaatcggctgcagccgctttatctataaccagatgcttgcagataagatcagctattaccagaaagaaaaaaagatgctccggaacacaccggccggatataaaaaggaatatccatggctgaaggaggtggattcccttgccctggcgaatgcgcagctgcatctggaaagtgcgttccggaagttttttcgggaaccagcctgcggatttccacgttataaatcaaagaagcatgcaagaaattcatatacgaccaatgcactaaacggaaatatccttttgcaggatacccatctgaaacttccaaagatgtccgtcataaggataaaacttcaccgtcagattccatcagactggaaactgaagtctgtaactgtgagccgtgagccatccgggaaatattttgccagccttttgttctgctgtgagaaccaaacagtggaaaaaagaccggcagagagatttcttgggatcgattttgccatgcagggaatgtgtgtattttctacaggagaaagagccgggtaccctatgttttacagaaaagcagagaaaaaacttgcaagagaacagagaaagctctcccactgtgaaaaagaaagccggaactatcagaaacagaaaaaaagggtagctttatgtcatgaaaagataaagaaccagagaaaagatttccagcataagctcagcagggagcttgcggaaagatatgatgcagtatgtgtggaagatctgaatctgaagggaatgtccggagggctgcaccttgggaaaggtgtgcaggataacgggtacgggcagtttctgttcatgctgggatacaagctggaagaatgtggaaaacatcttataaaagtagaccgttattttgcatccagcaagatctgcagtctatgcggacataagaaaaaggaactggcattgtcggatagaatgtatgtttgtgaatgtggaaacaggatggaccgggatgtgaatgcagcagtcaacatccgtgaagaaggaaaaagaatctataaagaatgtgcctgacggcacaagaaaaaaatccgtaaccggataaacataaaaaacaaaaccgcgggacacgcggggatagcctgttttagctttgccctaaagggtaatcgagcaggaagcccccacttcaaaatcgtaagatttaagtggtgggagcatgtcacgacttaaacatatctataattacttttatcaggagaatctcatgagtgaaaaaggattaaccaccatcaatttaaaaaaaataaaccgctccaaggtttaccaatatatatacaaaacacaccagacttccaaaatgcagatcgtccaggatcttcagatggggctttccaccgtaagccagaacctgaacctgctggaaaaagaagggcttattgacagaaacggatattttgattccacaggtggtcgaaaggcccaggccatccagatcgtctcggatttccggatttccattggaatcgggatcctgaaaaacatgttccatatcacagcaatcgacttatatggaaatgccttttatacagaaaccattgctcttccctattccaacacagaagaatattacagacagctgaccgataaagtacgaaaattcatcgcagaaaatcactatccgaatgaaaagatcctgggtatttccattgccacacaggggatcacttctccggataattccactgtgatctacggaaacatcatgaacaataccggaatgaaactggaggatttttcccggcatcttccttacccctgccatctggaacatgattccaaatccgctgcttttctggagctgtggaatcacccggagcttgacagtgctgtcgtgttccttctgaaccgaaacctgggcggtgccattatcaccaatcatcaaattcatcagggaagttccatgcacagcggaacccttgagcatatgtgcgtcaatcctgacggccctttatgttactgcggaaaccatggctgtctggaaacctactgctctgccaacgctctggaacagtctgccgggatgcctgtgaaggaatttttccctctgctccgcgaaaaaaaatccccccggcttgctgagcactgggaagattatctgaaccatctggcctttgccatgaaaaatctgaacctgatcatcgatgcaccgatcatcatcagcggatatctggcaccttattttacagaagaagatattaattatctgttagaacacatcaacacagacgcaccattcaccctggacagaagccagattctggtcggcacccacgggcagtatacacctgccattggtgcagctttatattatgtagagaaatttacacagagcgtgtgaatacagacatattcacctgaaccggtcaaaaaagcatgtcatacacagccagacggatacaatctgatccgctctgtcctagagtatgacatgctttttattttacttattattttttcagttctttcagcagctgcccgatttttgacacaaacagatcaaaggccacattattcttaccgctgttgatcacaatatctgctttcgcccgtgtgggctccacgtacagataatgcatcggttttactgtggtaagatactgatcgatgattccgtttaaatcccgtccacgttcctccacatctctggatatccgtcttaagatcctctcatctgcatctgcttccacataaaccttgatatccagaagatctcggatacggggatctgcaagaagcaggattccctctaccagaatgaccggtcttggttcgatcttcagcactttgtcggagcggttgtgctgactgtaatcgtataccggacattggatggttttgccctccttgagttctttgagatgctcgaccagaagatcggtttccagtaaatccgggtgatcgtaattcaccttcacacgttcttcaaaaggaattccgtcctgtctgcggtagtaattatcatgatagatcaccaccacatcgtctccgaaatacttcttcagtctgtttgtaaatgtagatttgccggagcctgaccctccggcgatcccgataataatacttttcatcgtctctttacctcttaagctagaattcttccactgtggatcacgcaggcttcccgaagagtttttccgtataaagaagctttttcttacacaaaagctgcccggtcggtgtgcatctcctgcatccggttccggacagcttttctggttattttttataaagcaatcgttctgatcagatctcagcctgctccagaagtgccgggatcttggactcccatccaagtgccatgatatgtacaccctggcagtatggcttgcactctttaatgatacgtgcagcgatctcaacaccagtgataccagcttttgttttctctttgtctgctttcagctcctcgatcatctcatccggaacatggatgccggctacgttgttgttcatgaacttagccattccagcagatttcggaatgatgataccaacctgtacaggttttccgaactgttttgctttttccataaatttgatgaatttctccggctcaaatacagcctgtgtctggaagtagtctgcacctgcagcaacctttctttccatctttgcaagctgagcgtcaacggaatcgctgcatggagatacaacggcacccttggagaatttcggtggctcaccaaccagctggtttcctccaagatctacaccggactcgagaagctgtactgtatgaagaagagatacagaatcaagatcaaataccggttttgcctgcggatgatcacccatcttcgtatggtcacctgtcagacagaggatgttctcaataccaagcatagcagcacttaaaagatcagactccagtgcgatacggtttctgtcacggcatgcaagctggaagatcggatccattccggcgtctttgagaactttacacattgcaagagatccaagacgcataaccgaagactggttatctgttacattgactgcatgaacgcctttgagataagttttggcttcttctaccagttcatctacatggatcccttttggcggtcctacttctgcagaaactacaaattcaccacggtcgaataattctttcattttcatattatatttgctccaatcatttaaaatttggggtacggtccacctgctctgcagcatacattgcggaatatttccggtgaaccgtatcataatttaatttggcttcttaataaatctttgcttattatttcacttcatcatctgtagcgaaattatggatctgtgtcgggcatttcagtgcgtcaaggcgtccgatctctttcagacgtctgtagatgcgctcccatccacactccatatcactgtccacttcgcatttaccattcttggaaccgccgcactggccgttgacaagactcttggagcatgctgtgatcgggcagatcccgccggtaaggttcagataacactcaccacactggtcacatttatattctaacggtgttacaccctggaaaccaggtaccgggtatgtatcgcaggctgcgcataccatcttgtcttccagatattctgcgatggtctgtacaccaacaccacaggagaataccaggaccagatccgcttctctgatcttatccatgtgtttctgaagacgtaactgcatattttccggattacagatataatccgttgtcatgatccctgtcacatttccttcagcggaaagctccttctgaagttcaacagcttctttttccggaaaacgaacttccttgcatccatggcagttgatgataaaaactttctttccggctgccagtgatacgatagtttcttttgcttttaactgggtaatcaacatatcacttcatcccccttactgcattttttccggctttgatactgttaatgatcggaatcttggaagaacagatatactgacagcatctgcactcaacacagtccatgacattcatgtccttcatgccctgccagttctcttctttcgcatattttacgaaatacagaggagaaagttccatcggacatacgtccacacagcgtccgcacttgatacatggctgctctttggtctcatctgtatcaatggcgatgataccgttggagcccttcatcataggtacctccagagtgttcagagggaatcccatcataggtccgcccatcttgaccagaacatcgtcatctgtaaatccaccgcagtaatcgatcagctcttttacgctggtaccgatcttgatgataaagttgccaggattcttgatcttctcgcctgttacggttgcaacacgctcgatcagcggcatacccttctggatcgcatcggagatcgcttttacagtactgatattatctacgataacgccaacatctgccggaaggccgccgcttggaacctttctgcccatgacgcgcttgatgagagttttctcagcaccctgcgggtatttggttcttgcaacaaaaacttccatatttccgatatcggcaactttttcctgcattaattcgatcgcatcctgcttgttatcctcgatgacaatgatgcccttctcagcacctgttgtcttgaggatcgctttcagaccgaaaataatatcatcagcaaactcaaggagaaccttatggtctgctgttaaatatggctcacactcacatccgttgagaaggatggtatcaaccggttttgcaggtttcagcttgacacaggtcgggaaacctgcaccacccataccaacgattccggcttcttttacaatctcaatgatctcatccggtgtaagttcatccagggctttatgtggctgtacggattcgtgcagagtattttttccgtcggattcgatgacaactgccatcacctcactgcctcttgtaccatgcatacgtggctcaacagcaactacggttccgcttacactggaatgtactggtgcgctgataaatccggcagcttctccgatcttctgtccaacctttactgtgtctcctacttccacgatcggattggcaggtgcaccaagatgctgggacatggagatcacaaccgtcttcggatccgggaatttcttcagatcgatatgctcgctgaattccttatgctctgacggatgaacgccaccatagtatccgttcagtctgtcctctctgatagacttcacgtaatcattgatcaccttaaagttaaccttggagtaatcacgtacctgtaccggctggttcaggaactcttccagacgaccctgttttgccagtctctggtagattttctcccatgcgcagtccttgttaggatccacttcacatttcccgttctttgctccgccgcactgtccgttcacaagactcttggaacagtcgacgataggacagacgcctccggtaatgttcagatagcactgtgcacatgcatcacagctctttttggtaagtgccatgccgtgatggcctctgtagttaagggtattacttgctgcgatcaccggcttaccggtcagatctgcaacagtctggataccaagaccacaggagatcacaactacattctctgtaccttccggcagcagatcctgtaattttctttctgtgtgcatcttgttgcacagaaaatcgaatttcgcactgcctgtgacggtttttccctgctccgcagcaaatttcaggaattcctcgcaatccggttcgtcaacggtctcaaattccttgaaacacttgttacaggcgattacaaacagattgtccctgccgttcagcactgatgcaagctcatcactgcttttcagcttgtacttagtatagttttccaattgctcaccttccttataaagattatatccttatgattatctgctcttatccgttccctccttctctgcactcccaggaaagaaacaataaaaccaaataaataagttctttgttatttgttcagcccttcgaaaatcccggtccaaaaaaaggccgcagtatttcctctgactgctacaataaatgtaccataatttgaacatattatccagttttattagctatttttataaatttattctatgatttcattccaatcgtctatggatgtacggatatttgtacaacttctgttatgctgcatgcgttagttatatgcaacttatataattttgtttataaaatatcctttttatgcattgagcatattgcacaaggattttatctttaacagggcagatccgaaaggtgtcttttgtcatggggtaagacgctgtccgcaatattcacaggtgctcagacgaccttttattacctgattctttgcaccgcagctggggcaggtaactgtaatatagatcttctcatttacgcgtctgttcggtgcagtgatcataatataatttccttctctgtctatctggatattccggatatatccccccgcaataaatttttccagctttttcactgcaccttttcccagttcctgctcaagcttttcaaatgagacggtattctgggcataggattcaaaccagcaggcaatttctccagcttttttcttctttaatgctttttgaatttcccggaaggttggatacagaaacagcaatccaagtatgatctctgttgctgccattccccagcgcccttcaccgatatacttctccgatgcgccaatagctcccagggaaaaaagtataaaaaagccacaaagaacccatttcagtttcccaagtattcctgtttttttatttttttctgtcaaaaaatcgctcatgtctgtttcctctttcctattattcaaaatcttatgctatatttgtgaatgctccgtcagctcacgccaaactccctctgtccgaatatgtttctgcattctgtggatcttctatttcagtgtggttacgatcagtttactttccagtgcagctgctattagatcctctttgcagctgtatcccgccttggcgatcatttcctgaaaattccatctcaccccagaagcagaacagtccattttccttgcgatctcggaatatgacatcccgtgaatatacaggcgcagcatctccagctgtctgggactgatatcaccgcttgtgatccagttaagttccacctccggtgccacatccggaaatacatgctccccatttaacgttctgtagatcacactccgtatttcctcttcaccgtgatccttataccatagactgtctgcacatccgctctttgctctttccagcaccttgggatcgatcagcgaagtaacaaccaatacctttgtatatggatatttttcccggatgatctttccggcactcagcccatcatgattatgaaatgtctgcacatccataagcacaagatcaattgccgagtaagagcagatctttacagcttcacaggcatccgaaactgtctggacatgtcggaattccggttcccgcataataatactttcaaaatacttctgcatgatcctctgatcttctactatcagtatccgtaccatagactcccatcctttctgtcagtggcattttcaacaccagacaaaactccggcgaaaaagaaacctgcataatacatttctctgactccgcagcttttctcagtgcagacagaccaccaccttcttctgcatttttttcaggtgcatctccatcattcgttatccggatgctgtattcatttgcacctttttctatcttcaccagaactgtacttccatgggcatgtctggcacaatttgtcacacattcacggatcgctctgtctgtcagcagcctgtaggagggatgctgagggaaattcccgctgatctgaacataaattccaagctcttctgcatgcctgatcgtatccgcgcataattcttccatattctcaacagaagaatctgtaagaatatagaccagatgctttagtgcagatagctgttcatccattttatcctgattttcttttctttccaatatcctgcgtattgacagaaggcttcggccaaaattgtcatgaacctgcattttcatggcaagtgtctcctgctctcttattttatctccgattttttcatacatttcctccagcttatgattcaggatttccagcttttcattatttgctctgatcttttcaccattgtaataaatttctgatacattaactgccactgtctgcagatatcctgcacaatccggctcctgcagacgatattcctgaaacatccagacggaatcatccggaaaataaaatacattactgtcactgtttaatctgcgaagtccctctgcttcggatcctccatttattactttccgcaatgcctcataatcctgcagataggagcctgtcattatcctgctcagttcatgcatcttggtgttgcataaaacgatccttccaagaggatccgaaaaacacaccccacagggaacatcatcaacagcttcattcacagaccagtaagacagagaatgatgatatctgcgtctctctctccagattgcccagcaaagataaagcaacaataccaccatcgctgccatcaaaacactgaccggacacatccggagcattagctgatatgcgctttccccctggcaatatctgtgatcattcatcaggaaacccataagcataaaagaaactgcaaaaacagtcactgctgttataattttctttttcccgtaaaaacaggttatcctgatcaacagaaggatcaattccagaatcaggcagatttcaagaaggatcatcaaaaaatcctgcattgccatactgcattccgcaaaatcagtcatcttccgcctctctttctgaatacgatacatccgataaaccattcgttttcatcttcctgctgcacatttaattccggtctttctgacattaatccccgaagatctgcttctgctacaatatgaaccgagatccgcaaagcatcatcgatctgcgacacacggtaaaaaacagactgcattgtatcaaacaatcgttccacaagccattcaaaggtatcatagcattttagtatatcatctgcattcagctgcacttcaccattttcgacataataagccgcccggatcttacataattttaagctgtcacaggattccgcaagactctgtctgagatcctccattgtaagcagatttccgtctgatgcatattgtgtcaataccagattttttcttctttttaaatatgtaccaacaaccacgatctttcccaggatccggtcatagtgttcccttgactccgttcttcccagctcatccatcagctgtgacagcaattccagctgcccggctgtctgattctgtatcatgttcagcaatcggttctgttcttctgtttttctccgctcagcttctttctgataggttttctgcagcagacgatttctggcagtcagctcctcctgctgttcccggatatcctgatactgatccagaagcaccgaaatatcttctgaccagaacaaatgtcctcctcttataggaatatggttgatccggattccctgttcctgtacagctgatctgtttattacaattttacgcagttccggtgacagctcaggaaaatcaccggaatgataataacgctgaaaggaatcatccgtaatctctgcatccagtcctccggaggtctggaataattcaaaatatcgattgttcgtctgtatcaggccgcataatatacatccctggtaaattgccgccatcaaaaggcagcataccgctgtcatatctccggcaattgttttgatcaaaggcagacggagtaaattcccgatattccatcccagaagcaatattcccggaataaccggcagccaaaattgctttcttcccggaatcctgctttttctgatcagtataatttccatccatatcaggcaaaatatgatccatccctggatcactataaaaagaataccatagctataatctctatctgaaagaggcggccgcccggaaaaccgaaacaccagctgatgcagatcatttgtaaaaacactgatgatcaaaaccaccgcaaaagcaagcaagacaataatttttctgcccgttttctcgccgtccttttcaccaagaaacatcgctgctgccagtccaaggaccggtatcaggatcatcgggatataatacagataccagcagatatgttctccaagcggatcatgaaaaatatgaaattttactgtccgtacaaaaaaccagaagaccatcagacagccaattgcagtcagacatctgcgcgtttttctatgcactacatgcttttccagataaatcacccaggcacaatacattcccagataaatacagttacgacactgatctgcgagatttctcataaaaacattttccggtcttcccagcctgcagaaatacgccagaaatacacttatcaggattcctccatacgacagtgccctttttttattgtatgtcatgaaaattcctctctcatcaatacacctctgtgataagtatactataaagttctattttattatatagttttcagagaaaccatccattctcaacccctgttatcacaaacagagtgaacaattctgtccactctgtctatcatcactcaaaatggtcttggctggccacagtattcgcagaatcttccggtattctctgcaccgcactgacatttccacaaaccgccgggctgctgcattccgttgttcatctgcattccagattgctgcattccgttgttcatattcatcccaggctgctgcattccactgttcatgttcattccggactgctgcattccattgttcatgtacatcccggactgctgcattccgctgttcatgttcatcccgggctgctgcattccattgttcatgttcattccggactgctgcattccattgttcatgtacatcccggactgctgcattccgctgttcatgttcattccgggctgctgcattccagccgcatttggtgtcagggcggctatgatctgatgacctgtctgctccacttccatcaattcacctctgttatcgctgcttatggaaaaagtattcaaacgaaaatccatatcatcaaaccatggagtttttactttaatacgcatagtataatcaaattcatacttatataccggtggctgatagcttacggtttctccatcctttgttgtatatgtttcctcgttctgctgtcgctctacatcaactctgcactgcacaacagcggataaaggaactatatccggattttcattgacatccagcttccgtgcaacagtaaaattccccttattgtcatcaataaaaacattgtaatttctggtattgatctgacgtgttatacaaaaatccattacggcttttttgtttttttcacgatattccagttgacgttttatatcctctaccgtactgtgccgccggtcttcaaaccatggtgacaatttttttgcacaatccttacacagatttccgtcatccagttttctgttgcctaataaacctattttctctccgcagatatcacagatcttcttatcaaataatcccatacccaatcctccttctttttatatttgtgtttttgtttatctacattatgcgtgaatgcttcgccatttgcactagcatctctgacagtaactgaattcatcttcatatcaatgtcaggatcataaggctcgtatctgaaaatcctgtccgtttctatatgttcaggatatgccgtatgggatactctctgccagacacaaccgtccccaccccacctccacattcggatactcctcatacccgcccacacgctgtgcgcctttccgcaggtatgccttcaccttttctccataaagaaacggatcatttcctttcacgattccccactccataagcagagctgcgcttccgctgacaaagggtgccgcaaaggaggttccggtgacagtggcgtagccaccgcctggaaccggggcggtgatggatacgccgggagctgcgaggtcaggcttccggatcagcaggaactgacttccccttccggaaaaatctgcgtaggcattctgtctggaatcataagctccaacagaaataacttttccagcagtggaaggaatcgtcagggttcccactgcccgtggagaataaaacccggttccacgattcagtacatttccgcccggcaaccagaggaaatactggccggaacgcacatgttttccacttaaaagaactttccagacaccgctgtccacataattaccttcaggaatgaaatctatgtagatttcctgggacagctgatatggaccgggttttccataatagatcagaagctctgtattttccagcagatgccgctgggggcccagccgttcatataatgggccaatctgttctccagacggactttccagataaatttccatctcatcttcataatccttccatagctgtacatttaatgtgggctcaaaagctcccactgccagctggatttcttctgttttcccctgctgcaggattcctcctgcatgccagggctggctgccgttatttccggttcctgtaacgatcacagtccgccccatggccgcaactgtatcaatatagttttccagaagggaatcccctctgtgtgttcattataactaggggaaaattactgtaaaaaaatttgcagtctttacactgcctgtttttctaccggataaggcgactgatacttaaatacaatatcaatgctcttatctccattcacaacaattttttcaatcaattctgtcacaatttctcttgtcacttcggataatgttccatacttgataaatttctctatccagttttcataagattcttctgcctctccaaagctgtctttctcttgttctgccaactgaatcttcgccctgatatctttatcctgcttttcatattctgccttataggagagatattcttctttatccagaacaccatctacataattttcgtaagttttctttttatacttttggacagccgcaagttctttttgtaaccgttcaatctgctggtctgcttctgcacatcgtctctgcacctccttcttcctatctgctacttttaatatttcatccttatcactttctttcagtgccagttccgcttgtctttggatttcattttttacaatagaatccaatacttcttttttaatgaaatgagaataacaaactgtgtttccttttttgtgataggtaccgcactcataaccgtcccgacaagtaaccctctggaaattatatccgcaatctccacaaacaataattcctgcgtatggatttacctttctcacttcgctattaaatcccggtgtccgtgttcttttcttcataagttcctgtacctgctcaaaagtatctttgctaataattgcttcgtgcattccttccacaatatactgctgttcctctggaatatattgatacttttccactttataggatatcttttctgatttatgctgtaccatagcccctgtataaactctgtttcgcaaaattacattgatcgtaggatatgcccagccctttgcacccgctttttctaatgcattggcatatttcaatccctgcacctttctcttatactctgacggtgtcagaattccttcctgattcagtttctttgcaataccatccctggaatatccttccaaactcatataaaagattctccgtaccactttagctgcttcttcatctacaagaaaatgatgcttatctgccggatcttttacatatccatatggggcaaacccagacataaactgtccccgtttcttctgggcggtcaatgcacctctgattttcttagatatatcacgactatacatatcattaaacaacgtcttaaactgtgccaattcttcattactgtgatgaacagaatccacgccatccaaaattgcaatataacgcacacccaaagatggaaaaacacgctcaatatagttactggtttcaatatgttcacgcccaagccgggaaatatctttcgtaataacgccttgaattttccctttgtagatatcctccatcatccgctgaaattccggtctattcgcaaaataaagccccgaataaccgtcatcaatataaatatctgcgatttccagatcctctgatttagtcacatactcacgaatcagtttcatctgattttcaatactctcactaactttattctctccatcatccttcgacagacgacaatatacacccatctgatacatcatatcaccccatctttctcaagtattctatctggtgaactctctactgaagcaaacttaaaatatatatctattttctgctctggatatacataaattttatcaactaactccacaagcgcttctctggtaagctgctttaccgttattcttctgcgattaaagtgctccaaccatatctttgtttcattgaccgccgcccgctgcctttgctcttcatggttcagttctgataattctttttgatatttctgattctctgtttcatacatctgttttaattccagatattcctctttggaaagtacttcatccataaactgttcatatgctcgtttccggtattccagatttctttctatttttgcctgcaattttgcaattttaccatccagttccggctgtttctgtctgatctgagtttccagattcttcatatccatcttcatctgtttcaattgctggttgattgcaaatacaaccagttcatccagcttttcaaatgtaatatgattcagctcacagtaattctgcccctgcttctgatgaaaaccacacatatatccgtcatagtctttatgagatgccagataacgttttcgcatggctgttttacatttcccacaaaagagcagtcccacatatttatgtggttcattgtttttatcaaaataggaaactctgcgcccctttcttatttgctgaaccctatcaaactcttctttagaaatgattgcctcatgtgcatccggcaccagctccatttcttccaggggaattgcctttttgtatttcagcttataagacggtctttcatgtttccgaatcacaaccgccccagtatagaccggattctttaaaattccacttacagtagacgatgtccacagaccttttcccgaatcccatacataattggtttttaaaacttcctttttatattttgcgggacaagggatttcatcttcattcaaagtcctgcaaataaccgtacagccaaatccattttgatacattctgtaaattcttcgaacaacctcggctgcataaggatcaatttccagatgattatgaattgttttacttttcacatatccaaaggggggctgtttcggagtatattcgcccatacttcttttggtctgaatcgttgtcttaatctttctggatgtatctctcaaatacatatcattcagcaaagtttttatttctaacatttcatcataagttccaacggctgaatcataattatccagaatcgaaacaatccgaatctgtttctccgggaaatatttgcctagataatagttggtatcaatatgttctcttccaagtcgagatacgtccttaaaaatcaccatattgataacaccaagctcaatatctgccagcatcctccgaaattcagttctttcaaaattacttccagaagccccatcgtctacataaacttttttctctgcaatatctttattctctgcaatataatctcttgccatctgaatctgagagtgaatactattgctgtattcaccctctttattttgctcttcaatggaaattcggcaataaattcctgcctgatacattctatccctcttttcatcggtcttgcgtagtcattgtctttaattgtctttattttacaacaagaacttaagaaaatcaacctgcaatttttcgttcagtaagattctgaatgcactggatcaatgtcttttccccattaaaatgcactcgaatctgatatcctgcatgttcatagcttacattctctttttggatttctttttttgtatccagaacttctacagaatcaaataacgtattcatgctatatgcctccttcagcatacagttctctctacatcctatgccggcaggattgtacaaaagttctgtatgaattgaattcggctttcgaaagcctgattacattctaaaattattctgcaccaatcacattgaattgaaattgaccgcagattgagtttttaagattcattttcttcctatacagtatcaattcctattgtccggaacatttgttcgtgttataataaaaagactttaagaatataaaacacgaaaaccaaaggagggatttctgttggaacgatgtgatttttcttctattagcacatgcctaaaaaatcaaatcagtgaaagcaatcagatgaaccaacctgattttttatacgaattatttgaagattttatgaatgatccgataaatgaagatttttctatggataatggtctaatttgccgctggataaccggacaagcaaaaatcagtcccaaaataacctcatattatgcaaaacccagcaatcagaaaaaactggcaacaaccattcagcggaacttacttcccttaatggcagactgcaacatggttatacaggacatttacacgttattcatacaggacgatacgatttcggatacaaaaaagcaggaacttgtatctctatataaaccttctgattcaaggctgttgtttttagcaaaagtactttcttttggtatggaacggcaatttattaaacgtgatacaagaaatcaaaaactgattgcaggaggtgttctatctccgattgttctggattacattatggacagcgaagtcccaaaaccatgccgtcattttctaggaagagaagaagaactggatgaactccatactttgtttgaagagaaccgacatatatttctttatggaattgccggaattggaaaaagcgagcttgctaaagcctatgcaaagcaatacagaaaacagtacaccaatattctctatatggaatacaccggtaatctatatcaagatattgtagacatggattttattgatgatccaccagaaatcagtgagcaggaacgttttcaaagacataaccgtttcttacgctctttgaaatctgatacactgctgatcatagacaattttaatgtcacatccacacaggacagttgcctgtcagtcgtattaaaataccgttgccgggttttatttacaaccagaagccaactgtctgaatactgtagttttcaattaaaagaactgaaagatatacccactctttttcaactgacatctgtattttattcagaagcagaggaaaaccgggcaatcgtagaaaaaatcatagaaactgtacactaccatacttttgctgtcgaactggcagccaaacttctggaaaatggaattttaactccagagcaattattgataaaacttcaagaggaaaaggcttctcttcataatgaagataagattaaagtaatgaaagatggtcagagcaaaaaagccacctattacaaccatatccataccctgttttcgttatactccttatcacggaaacagcaggatattatgtgcaatatgtgttttatgccttcatctggtatttctgcccgtatattttccaaatggctggagctgcctactttaaatgacgtgaatgatctgatcgagacaggttttgtacagtcaagtctccggcatactatttctctgcatccaatgattcaggaaattgcagtttccgagaccgcaccttctgttacaagctgccacacgttattggattctctgcaaaaaatatgtttgatgcatgccttcctgtcctcgcccacatctgcagtaaaataatcctctgtatctgtgttttccaattcagtactcatccaactccgtgccgcttccacaccgtgatcctctgtttttttttgaaattttatctccatcttttccggtgcagacgcttcatccggtgcaagctccatcccctctcgggttgcgttttgaatccctgcaatcgatgtagaatatgctgattgcaagtaacttccttccttgctggcaatcctgtctaacacttcctgatacgcatcctttgtcaccatctgtggcatatatagttcctcaccgtccgtaaaataatcaatcaatccattcagttcttcctgcgttaactcgtgattttgcatctctatgactggaagattgccaatgctttgttcgcccaacttaatatctgcctggataaccacacggtcgttgcttttcttttcttcaaatttccaatgcgttggaacatttgtctctctcttttctccttttttaagaggttcacagacagccgcctcgctaatcccatccactttgctgactaccgaactctcctctggtgtttcctgacagctggaaagaataatacacaacgcacctaccataattgctagaacactttttttcatttttcctccatatatcttatagaattgtcgctttttcacgaaacttcaattataaactctttaacttataaataccttcctgacactattaacgttttcgtatattttttagaaacagactaccttatttattttaatgtataaggcagtctgttctatgtactagtaatccaaagaacgatcataaaaatatttctgcattggtgtttgaatgcatttaattaatacctttcccatattctttcccccgtatttttattttatctgcgtcaggacacctgcatccatctcacagatcgtatcgcagagccattcgatctccagcatgttatgtgctgcgataagaatagtcttccctcgttcctttaatccccgcaaaagctcgcagacctctcctgccccctgcttgtccagaccattaaaaggctcgtccaatatcaaaagctccggatcttccatgattgcctgtgcgataccaagacgttcacgcattccaagagaatactgtcctaccttctttttagacagaggatcaagccctagggcacgcatcgtcgccctcacatcgtcatcggaaatacggtgtttcagagacgccagtctctttaaattcgcaaaaccgctgagatccagaaagaagccagggttttcaatgataatgcctacggaatctggaaagtccagctccttcccgatctgttttccccctacgagcactgtgccgctctcaggttgtaaaaatccacagatgcatttaaacattacggttttccctgaaccgttaaaccccataatcccatgaatcttccctttttcaaaatcatgggtaatgttctttaatactttttctttttgaaaggattttgtcagtcccttcaacctgattgcatattccattttgccctccatttattcgtttgtctgcgtaaaagagaaattatagcccttaattcggacggctgacaagccgatcagcgctatgattaatattgcaaatatgaacatgctcatcccgatccctggcaggtaatcataaccaaagctgtgcatgggaaaggtagcttggttcaacggagacagccagccgcagaacacgttcgccctatattcctgactttctgtaaaatgaaacagtttccggaaaacatctgggttcagcaggagcccatacagactgactgcaaaagcaccgatcacccctgccatatttcccgcagccagatttaaaaacaacatgagaactgcgataaaaagagtatataaaagtacaagtccaaacactattgctgcgcacatataaggagttgagctttccattgtttttatggaaacaggaacggttatgctctccccaccgccatagcccaacattgccgctgtttcgctccacacatttcccgtaaaggaaaagggagctcccataattccaagcatcacagccaaaaaaatattatagatcacagtcgccaggatcacatagataatctgacccgcaagccatatcttccgttttgtgcgtacaagccaatacggagttgcctgactgataaatggcatgtccgcaaagagcaggattaaaagcagggaggacagcataacagaggatgcatccccatatgtccaaataaacggctcgaatacctgaaggattgtctcatattttatcgcatgggaaataatctgatccgacagcatcagacataatatagctgccaaaataaaggtcatccagatcctcggactttttttccatccatagaaattctggcctgcaatccaaaaagcctgtttaatatcacgcataccgcaaccttctttctattgcgcacataaagatcagtgccgttaaaaaacttccaaccgctaatatagcaatgcagaagatatcattgtagtaaatagacgccgcccaatagcggggactcagaaagaatgctttttgatagtaacgctcctgaaatacggtcaggacataataaagaataaaaggaacggcataggacatatagcgattttttgttatgacagccgacgtaccgccaattagcgcccaaaaagcgccatttaaaaacaatctcagaaagcttaccgccgttctgcccacaagcactgccatctcataatttccgtcaatcagagaaggatactgaccgaacctcagtatacagattacaagaaggaacaccatggctaaaaaagctgtcaaacctccggagaccaacaatcctgctgcttttcctacgagatactgttttctccctgaacggatataactgaacagaaaaaaacgactgtgcagctcagcctccgtattctctccacccgcaaaagcaacggcaatgggaacaaacagaagcatattaacgctgttcatacaataggtgtatgctacgaaccagcctggtccttctgcagatccgcctgcatttatgatcttctgcaacatctcatgctcagacatcagggtagccgaaacgattagaaaaatccccaaaataaagcgaatgcttcgaatattgttttttatgtccgttgccaacacatttctcatacgcttttctcctcacttcaaacagctatagacttgatttttttatttttataaaatcctagttttttgcaataatatcactatttgtataaaactacactccttatcaaacaacagttaaggacttgcaaaaactgttgttcctactgaaagcattgcaacagctgtaaaaattgataatattttaaattttctattattctaagttctacaaatacataagccgccagttaagtacgattagttttattataattcaataaattccatccaactttccacattttattgtacaattttaccttttatataataacatgtcaacatttaatgaacgtttataacaaaaaaatgcagggctataaaaaactaaagaaattgctctattttacaaaattatatcctatttttcaattccaactcaattttccctcaatgtctttttcctccaactttcgtatgcttatctcacagcaaagcagtaccacaccggtacagcctgctgaattaatcaatacgaaaatggaggtgttttttatgcgagaactcagaaacacaaaaatcattgctgtagatcacggctacggcaacatgaaaacagcaaataccgtcacaccaaccggaatcaaagcctatgaaacagaacccatcttcaccgggaatattctggaatataacggcatttactaccggattggcgaaggacacaaagaatttatcccagataaagctatggacgaagaatattatcttctaactctcatggcgattgcaagggaactgaatgtcttttccatccgtgaagcagacgttcatctggctgccgggcttcctctgacatggatcagaaaccagagagaagatttccgttcctatctgctccagaatccagaagtccattaccgatttaacagcaaagagtatcatctccgttttgtgggatgcagcctttacccgcagggatatccggctatcgtaaaccgacttggagatttcaaggggacaaatcttcttgcagatatcggcaacggaaccatgaacattctgtatatcaataataagaaagcacaggaaagccggtgctggacagaaaagtttggcgtaaaccaatgcatgattgccgctaaaaacgctgttctggacaacttcggagtaaagattgaagaatctaccgtagagcagattctgcggtttggaaccgctgacatttcagcgtcttatctggattgtattactgctgttgccagacagtatgtcacagatatttttgccacgctccgcaaatatgaatacaatcctggcctgatgcgcctgtatgtggtcggaggcggtggatgcctgatccgtaactttggagcgtatgacaaatcacgagttaccatccttgatgatatctgtgccactgccaaaggttatgaatctctggcttatatgagcctgaaaaggaggggataagccatgcagaaccatatccgcaacacaaacctgcgatttaatctggacaaagaccagcagcggagagcctgggaatatttacagacgatggacagacagaattttaaatcttacagccaggtaatctcccttgcactggtcgattattttgaccgctactaccgcactcaggctgatccctatctggaaacaagggaacgggaagaactttttgtgaaacagattgtagaagcagtagaacacagcctgaaacagtcattgccgatttttctgtccgggctgactgcaggcatgttggaaagggaatcccccatcaggatgccctttccagctcctgaaaaagaacagccggatcgtgatatagactgggattttcttggagaataaaccattgtgattggaggtgaacacatgacggactttctgacagcagacacaagcctgccatcttatatgatgtttccccgttttcttctggacatggaaataaacgaaactgccaaaatgctttatatgatcctgctcgaccgtgcaaggctttcccagaaaaatgagggctggtcagatacaaatggtcatgtgttcctctactttacgattgaagcactggcagaagttctccacaaaagccagatgacggtgaaaactgctctggcagtactggaaaaacaagagcttatcttccgaaaacggcagggacccggacaccctaatcggatctatgtaaaaatcccgaaagaaaccctcagcaatacagacagaattctttcctcaagacagacagaaaactgtcctattgacagacaggattctttccctgatacagacagaaaactgtccagtaataagaaagagataaaaaagaaccatttaacaataagagggagtaaagagccacgctcaccctatggaacatttcaaaatgtttttctgtcagagacggagctggaaaatatccggcagacaatccctgactggcaggactatatggaacgcttatccggttatatggcttctaccggaaagcaataccaaaaccatgcagctaccatcatccgttgggcaagacaggatcatcctgtttcccggcaacgaaattatgaaagtgaagaatacgaaacattatgacaacatttacagaaaaaccaacagctatcacaccaaacagagagcttcagtctgatgaatattttaacgaaacaaatcacctgatctactgttccaaatgcaatacgccaagacagtgcaggcatgaattacagggaaaggttcttattccttccatccgctgtaagtgccagcaggagatctttgaacaggaggaagcccagagaaaacttcatgaaaagcaaatggaaatagagcatctcaaaaccagcggcttacaggacaaatcactttatgactacacctttgccaaagataacggcagcaatccggaaatgaaacttgcacacaattatgtaagtaactgggaagagatgaaagcaaacgcttccggacttctcatctggggcgatgtcggtactggaaaatctttctttgcaggctgcattgccaatgcccttctggaaaaaggcgtcccggtactgatgaccaacttttcccggattctgaatacccttaccggaatgcattttgaagacaggaatcagttcatccacagcttaaaccgctacagccttctgatcattgatgacctcggaattgaacggaactctgactttgcactggaacaggtattcaatgtgattgacagccgttaccgcagtaaaaagcccctgatcataacaaccaatctcactttatcagagctgaataacgccgctgatatcgcacacaagcgaatttatgaccggattctggagagatgtgttcccatccgtatcaataaccggaatatccgtcaggacaatgcaacagctaatttaaaaaaaacgaaaaaaattctgttagataatcacacttcaaaccagagttgaaacaaagcagcatcgcacaataactatttttcactgacagtagtactactttcttttcttatttatcaccagagacatgccactgtcagttatctaaaactatagtactaaaccacaagattttaaaactaaatcgcccggatacgggcataaaaaggaggtgccagatatggcaaataaaagaattatgacaccagaagaaaaagtgcttttacaggcaaaacacagactggaagaaatcgaagcaagaaaccgtaaaaaggaacgtaatgccagaacacgcagattgattcaagaaggagcgattctggaaagcattgctccacatattaaagaaatggatttagataccctaaagcgggagctgatgctccggctaagaggaatgtaaatacacaagttctactcccgaagggcgcacttactcaccacccgataaatcgggcggtggtatcccctacggggctcgtgcgctctgccgagggctatccgctgttgcaggcaacatcgaaaggaggtgccagatatggcaatttatcatatgcaagccaaggtcgtcagccgtggttccgggcggtctgctgtcgctgcatctgcttatatgagctgtagccgcatatacaatgattacgatggcatccagcatgactacacccgaaaacatggactgatctatcaggaagtaatgcttccccctatggctccgcctaaatggaaaaaccgggagcaactctggaatgctgtagaagctgctgaaaaaacaaaagacagccgactggcaagagaatttgttgtcgcactccctattgagttggataaagacagcaatatttctcttcttcagaattttattcaaaagaattttgtagatatgggaatgtgtgccgatttcgccattcacgatacagatggtcacaatccccatgcacacattctacttactgtccgtccattaaacgaaaacggaacatggcagtataaaaccgaaaaagaatatctatgcatcaaagatggagaggaaaagggatttactgcttctgaatttaaggatgctcagaaagagggctgggaaaaacagtatcgttataaagctgggaaaaagaaagtatatctgactccctcggcagcacaggagaaaggttatgaacgtatcgacaaacatccaaaaagcacccggtatggcagacaaaacccgatttccgaacaatggaacagtgaggaacagctctgcctctggagagcaaactgggcagatgccgtaaataaaatgcttgcccttaatcagataaatgccgccattgatcaccgcagttttgcagctcagggaatcactgaacagccaaccatccacgaaggctacattgcccagaatatggaaaagaaaggcatgatagcagaccggtgtgaaatcaaccgtcgggttcgtgcggataacagaatactacgggaattaaaaacacagataaaaaaattggttcaagctgtcgaaaaatctattccggtaattgcagaaacattagaagcaatccgcaatcatatgatttttacacaatatcatttacttcataatgaaatgcaaaaagaagtgatccatgactggatgcagcattttcgtcctatcctaaataaatatgataccattaagaaaaagctcaaagcgaaagttactgaaaagaaagaactaaatgtgcaaaaaagtaaaaccagtattctaaatcctttccagcatataaagttaaaccagcagcttacaaccgtaacagaagaaatcgaggaactgaaatctgccaaagaacagctgctgtttcaggctgaatgctccacagagaaagatatggcgagcctttccagaaaatacgaccagatggataagaatctggatattctcgattctcaggatatggctctcaaagagcagcttgaaaaagatgctgtcgctttccaagaggaaaaactccggcctaaaccagagcaatatacagaattactggatgccagaatccagatacgacctactttccgagagaaactgattgagcagctcaaaggtacttttggtgaatattatgactatcactatcgtgatatcgcaacccatgaagtggatgatctcaatatggaagatccctatagcttctctcatcgtacctgggaacttgaatatcagaggaaacaggaattgcaaaaaaaacatcctgttcaatccaggcaaaaatcgcacaacacagaactataatgtttaaactactaatataaaaaatatcccgttttctcaaaacagttatattgcttcatcccaataattcacaaactgctaaccaccgagcaaaagtgaggcacaaagtgcgtaagcataatttgatttctttccgcttacgcactctctttttatcttgagcaaaaaattcctactttgtaaagccaacaaatggggtttggggggctcccaaagtgcgtttggatatccaaacgctatgcttgcaaaaccagttccactaatttccctcgatactcccttcttctaaaatcaatgataattataacattgccaattttgtaaagtaataatcaacttaaaatatagacgacaaacaataaaaccatgatactgttacaaaaagcagtagcatggtttctttatatttcattatagattttctctatctatcatattttctattgtttctgagaaacaacactctttcaaatcaatacttttgtccatcttcacaagatttgtatatttctcatctgtatagtgttttgatattacagcaaatactttatatgtaggctgtgctgttacatctctgatgtcctttttcagcaatgtgttcggtacatttaatttcgtatttttatcttttacgaagccaatacaaccacatatattcccggcagctttttctgtatataatttcggtcctcgatctgtaaattctcctatcattgttacgtttttcttaataagcatcatacgttccaatatatccaatttttgccccgtagagccatcttttgcaaaaacaaaatcattttctgttaatcgcttatccaggcatttctggtaaaaatgaattgcagaagctgtctcttttttattcaatcgaactcctgtcaaatgtaaaaaattgtatctatggaaaacaacttcatatccctgtacagatgacaaaatcttattactttcctgtaattgcttattcacctctttcggtaagccatataggaacaaaaccttctgatcctcaagatgttctttatatagttgtgccgcttttgtcataatctgaattgcacgtcttttgtccataacttaatccttatcccataaaatttagagaagggaatgttcacgccgcagcactaaacattcccttctcatggttgatttttccgttgtctgccaacctccagcaccttcgtctggaaaatatcaggtttttccgttgcctgccaacctccgacaccttcgttcggaaaacgtatcagattttaggtgtcaacccaccgctgatgcacagcttttctaattacattttacacgaactatgtggaaaatgcaattacaattttatcttatgatgccctgctacattttatacactatttatcttacatttcattcttgataaattatctctttatccacaatctccctcgcacatacttgtatattgttcattcttcctatccattccaagacattttccacctttagctgttctgtaatgccttgtgcctgtttcatctgttctacaagtctttcaaagcgttcctgtgcctgttcttctatatcagccaaataaccattcagcctgccgcttgtaagcatattcagatatagcaatctgcggtattccttcaaataccgcaaatgtctttgtccccatacaccgacaaccctttgttcttcttccttcggtaaggtaagagcagggataagataatccccatgtctgatataagtaccgcccatctcttcaaaaattgttttcttcattgtctgttctacctttcttatcgttctctattcatagattttctttacgaccgttccaattttacagtaacaataattcttcaattttcagttcacattgcccctcccgaagaagtatgatagaataattctattaaattgaatcggaggtgccacatggctatcagttccaacaatattcaggtctatactactttgtccaaagaactggttgctgagattgataaggatgcaaaagcgaactatcgtacacgttcccagcagattaacatgatcctgaccgagtattataagactcaaacaacaaccaaacatgaatccgagtaaaacactgaattgcctgaaaacacaggaaatatcagtgttttcttatgttttcccttaattataaggttcatgggaaccataattattcccaaagctgatgtttatgacgatcggttttctcatcttcactgcctgccgtatcaggtaatcaatcccctccatcagctccgttgtccgcggaaatgaattttcccgtggacttcccatttttaccaccagaagatcacttctatacgcaacgcctcgattcactccatccgatgctctcccatttcctgctgctattccaagaactgctgttccatgtccgctgaaatctccagacggaacaaggcgcctgccttcggtttccccgagtgcaagcgcctcatcaatttcttccttcgtatattcagttcctgatacatagttttccggtggatttccagctacactctgatcccacagtcgcaggatccgggtactgccatcctcgtttctgaaatccggatggaaatagtccactccggaatccacaatacccaccaaaatcccctttccggttaagccatcggttccattctgcaccggcaaaatgcagcttgcttcccgcccttcaaaggtctcaaagtagagtctcttgggcttttctataaactcgatctgctctctgactgagtatgcagcaatttccacttccggcaatgtcactactgcataaccaccaagcagcgggaccacctggatcctctcaccaccaagtccgctttccgggccactgtacttcacgatcacatcccacagcctggtggtgggatcatatcccacattcagatttcccgatttcgcccgctcatgcggcagggcattcatggcaagattaagaagattctctaatttctgatctggcataaggctttcatttccattgatacattttttttattatatgcaaaaccttcgtttaaagcaccaaccatctgttccagcatttctcttttaattccgggaacgaagcttaacaactgacgaagcggcattccttccatcatcgcagccatcatttcctgattatttaaaaagacccttggtttttctgtcagcgcatttattttgcgctgcaagctggaggaaggtaaagaattgctgcaatacactaacaaatccatcagtacctttttatgcttctccagccagagccactttcagactgcttttaaaaagcaattcggaatgactcccaatgaatgcaggcgcatggggtcataaatcgtctttagatatctcaaaattccatggatgtaaaaaggcatgagccatttatatgactcatgcctcttcagccaaacagaaatccgtgatctcatccgataatattatgccgttgcttttttatcatctgtcttctcaagcagtttcttcacgccctggatcgctaccagtacaccaaggatcagcagtaatactgcaaatacaagctgtaaggtgtttccaagatccagtcctgttgttaccagtgcctttgaaagctttgtgatggtcatgccaagtgctgtgaaggtaactgccatcatgaataccatcgggatccagagcatgcagccctgacgttttgttttctttaagaatactgcacaggctacaagagcgagtacagataacagctggtttgcggagccgaacagcggccagatttctgcatagccgacctttgtaagcatgtaggcaagtaccagtgtaatgactgttgcgaaatatttatttgttactaccttcaggaacgggctcatgttttcctcatctgtatcagaatcaaggaaaaattcctggaatgacagacgtccgactctggctacagaatcaagagaggtcagtgcaaatgcggatacagcaaggttgatcagagtaaataccagtgaatgcggaaggccaactacagaaaggaagtttgcgatagcacctgcaaaaatctgcggctgtgttgtaagtccctgtgctgctgcttcaccatctgcaaaggatgcaactgcgatcagtgcgatgatggcaagcatactttccatcagcattgctccaaaggaaacaggaagcatgtttttctcatttttgatctgcttggatgcagtaccggaagataccagtgaatggaagccggaaacagcaccgcaggcgatggttacaaacaggatcgggaacatatactgtccgtctacgttaaagcttgtaaatgccttcaggttacaggaaggattggctacaaatacaccgataaccgcaccgacgatcataaaaatgagcagatagctgttcagataatcacgtggctgaagcagtgcccatacaggagcgacactggcgatcagaatgtatacaaaaatgatgatatgccaggttccaagacttacatacatggggaaattaagtcccaacacaattgctgctaccagcagtaaaattgcgactgcagtgttgacccatttgttgaattttgtatatttaaggaaaaatccaagtgcaacagcctcaaatataaataacatggaagtggttgcaacagctccgtttgccgctacctttgtaactgttcctgcatcatttacggcaaatccgttaaaggttcctgctacaacatctgcaaatgcggcaacgaccagaatacagaacagccagcagaataaaagaaataatttttttccaagctttccgatatacgcttcgatgatatatccgatcgtacgtcctttattctttacggatgcatacatggatgcaaaatcctgcacagctccgaaaaatacaccaccgatgaggatccataacagaaccggcagccaaccgaaaattgcggcctggatcggtccgttgatgggacctgcacctgctatggatgcaaactgatgtccaaatactacatttgtatcagccggtacataatcaactccgtcctccatttcgtatgccggagtttttgctttcggatcaatgccccatttgttctggagataacggccatacagaagatatgcgcctccgagaactacaatggctatgatcatcattgtgattccgttcataatatcaactctctttcctttgtgttttttatacatgatacaatgaccgtaaaacagttattgcatcaaaaaacgcccttgctatcctttcggataacaaaggcggaatgttccgtggtaccactttgtattatcgtatttattgctaaacgcgaccacttattactgtcatatcaaacagcctcttctgtaacgtgaagactacgtcccggcttacttaaagatttctattcagcgggatgctcccaggtgatatcacaaaataccttctgccgcttctcaccagctgcggctctctgtgatccggtctgcttcttgtgatctgtcctgttccatgcatttctcttttttatttatctaatgttttactcctttttttataaaaattcaacaaataatttatatatattttacaaatttgcatatgtttttttatgcattttttaggtaaaagcccaaacacggcgtatgtaacgaagccagatctgatcccagctctgctttacgatccgttttccgtcacatacgccgcattatccattattcagaaaatgtatatcttaccatgtatccttttccgtcaccggttacaatcacgactccgccatcgggattctcgatcttatcaatgatcggaaatcttcctttttcttttacgaaagcttccggactctcgatctttgcttcaacgatctcctgctgagaatgacgatcgccaccgcagggattaatggtttcaataatgatctcatattccttcatacccttcacctctttcatttaatgcagtttttcagttcttatacttacattttatcgtaaaaatcccgatcatgcaaaatgcgttctgcacaaattttcagaggatttattggtatttttcactacattcagactttttctgtttccggatgttatcttcctcaaagaaggctttttttattctacaaagtggatcctgcttttatcaaaacgatcctgctgcattctgctctctgccgggtaccccagggcaaaaagagaaaatacctccacattctccggaagcttcagaatatcatggaccagcgccatacgatccttaagcggtgcaattccgatccacacgccgccaagtcccagtgcatccgtttccagccagatattctcctgtgcgatagacatatcgatctgtgccatatcctgaacaggcaatccctctttccgatataccggaacgatcacaaccggtgcacctgctgcacatccggaatagggagtggctttggaaagctccaggatcttctccttatctgtcacaacataaaattcccacggctgctgattacatgcgcttggcgcctgcatacctgctttcaggatctgaaggatcttttccttctctacgggtttatcttcatatttacggatacttactctgtgaaaaatattctccatgctattttctcctcgtcatactcatatcacttgttacagttcatactcatcatacagcttctgacgccattttacatccgtcatcacacgctgcacttcatccgaccgtccatccaaaaacaaacgattgatcactcccaccggtatatacaaattataccacatcatcaaaacataaaaaccccataaaacgtatttttacaaactctacagtaacttaaaatggaaaacgctccagaatacgaagctttcagaatgtccatacagacaagaatcctataagatataataaccataccacacatcaataaacaaatcactcaaaactgttccaaaaattctcccataatctgacaccgccaccatctgaaaactcccggacagccaaacatccgggagtttttcttatatcacttataatcttcagaaattatttctcctgcacattgataataaccttcatggttgtctcacggttctcatcaatatactgataagccttcagataatctgcgaacttaaatgtctttgagatcagcggctttaaatgaacctttcccgcatttacaagatcaatggcatctacataatcatcatggcggtacatcatagtactcttgatatccagctcgtggtcattggcaacagcaaggtcaacggttgccatatccgcaaataccgctaccagtacgatcacgctgccttttctcgcatactggatggcctgtcccatggtgatgttatttccggcacagtcatagatcacatctgccttatccggaccaaacgcctctaccagtgcctctccgaaatttttctcctttgtgtttacacagatatcaatgccgcactcttttgcttttgcaagacgaaggtcactgacatccgtgatcataaccctggctgcccccattcctttggctgtctgcgcaacaagatttccgatgggacctgcaccgatcactgtgatgttcatcccttctacatcgcccatctgcttcacggcatggactgcaactgccagcggctcgatcattgcaccttcctcgtaagacatctcctccgggatcggtgttaccttagatgcatctactgcaaagaattcagaagctgttcctgttgtctggaagcccataaccttcagttcctcgcagagattatattttccatggcggcatggataacagtgtccgcagtatacctgaggctcgatggttactttctggccaaccttaaaacctgtcacattctttccaagtcccgtgatctcaccggatacttcgtgtccctgtgttaccggatattttgtaaaaggatgcttgccgtgatatacatggatatctgatccgcagataccaatgttcatgatcttaaccagaacctggtcatctcccacttccggaactggaacctctctgaaaataatctctcctggatttgtcattacctgctgaagcatcttattctcctcctttaatttctttctattgcatatcatcttttattaattattttattaaagtaattacattattattcttttctcctgatctgtcaagatagttttctatgattctgcttattgaacaagtttgcagctttgtttttatgcacattccataattatcggtaaacggaatagtcaagcgaatattcgcaatacgcttcgctacttgctcatgaccgaataactccttcgtggtttatcggttaaaaaacgaagcctgcgaattcagcatttctgtactcatatgctgaatccacaggctccttatacgtttttataaatagttttataaaagtatgatattcctttccggcaggtttgtaaaggcttttatcaataccagcgtgtcatcggcagatcattattcacacccttggtcataagaatctggtgaagatcgataattccgttgtggaaggttgccgcacatgctgacaggtacagatcccacatacgcaggaactcttcgtcaaacatagtcttttctttttcaatattgtcccggaaattcttttcccagtgaagcaatgtcttattgtaatgcagacggagattttcgatatccagggtatggaaattgtcctctgccatatggttcaggatctcacgtaagctcggaacagttccgcccgggaaaatgtatttcttgacccacggatcacccggatgctccttcagagcactgataaagtgaagcagaaacagtccgcccggcttcaggaccttttctacgcagtcaagaaacagctgataattatcacgtccaacatgctccagcataccgacactgacaacacggtcaaactgatactccttcttcggcagatcacggtaatccatcagctctaccgtaagataatcttccagcccctgatccttgatccgtctctgaaattctgcatactgttcatgacttaaggtgataccggtaccatgaaccttatatttcttagctgcctcgatcagcagaaaaccccagccgcagccgatatccaaaagactcataccctcttccagatgtaattttttaaggatataatcaactttatttacctgtgcctgatacaacgtatcatcctcatggataaaatacccgcaggaataactcatagtctcatccagccaaagtttataaaagtcatttccaatatcataatggctggtcacttccttttcctggttcttctttgatgttgaactgaacatgatctttttcagagcagattcattggtagaaaattttcccatctgacccagaaaatgatccagcgcttcataaagatttccctcgatatccaaatccccacgcatatacgcctcacccagtgcaagggatgtgctcttcatcagatccgccagaggaatcgctttcttaaaattcaccgtaaatgtaggttcaccctctccgatgtgatactcggaattcttgaactttaccagaaatggataatctgtaaagcgttcaaggaactgcaccattgctttctcttccgtcttctcctgtaatgtctcaaacataatagtctacctcctttaacacagcactatgatacacccggaggaaggctttatgtcaagggagatatacaacaaaattttatcaataaaatgagaatatttggtaaaactcttccttataattatttatagttatccaaattaactcgatatttaaagtccacatttaacccagccctcaaaagcactgacattttcaaaacataatcgttaattatatatcatttcccgataatcatctttgtattttacgcattttttattgctttatatataattcagacttataataaaagatacaaaaaaagagcgaaaaccatataaaaatccaacactggagggaaccttatgaacgaagaactttttaatgaagcatcaaaatccaacatcctgtcaaaacagctggtcgatcaacttcaggaaagcatgacctacagcagcatctccttcatcaattggaccatcgaagtcctcaagctcctgaaagcccgcatcgaacgcggcgacaagatcaaagatgagaccaccggcgtgatctacgatttctacaccttccgccaatttgtagaaaccaacttctccacctacatcaccggccaggtcttcaacacctccatccggtcccagaaagtctacttcaccctggaagcctgcccaggcggctacaacctcctcatggcagactccggcaacgaaaaaacctaccgctggatctccagcttaagcaaacgcttctccctggtagaaatgatcgccaccggaatcgtctacgtcaaagacaaccggaccgacacctaccagccatttatctccgaaaacggcaaatactgcaaatacaacaaagacctgggaaaactcatagaactctgatcaaaacggggaatccgccaacggcagattccccttgattttttctcagatttctttcaaaaaatcaaatggttcttcatctttcaaaaaatgcatcagcatataagcacacatgatcgcaaccctctcctccttcaggatcctcctgatctcatcccggtccgcgatcacaacctcgatctcctcactatcctcctgagcatccttactaacctcaccactggcatacccataaaccgtagcacaggattcatctgtcatcccgatcgtcgtaaaataaggcttctcaaaagcctccgcaaccttgatcggctccagcttcaacccggtctcctcaaacatctcccgcacagcaccctcatggaaatcctccccaggctccacaagccccgccggaaactcataaatatacccgccgatcgtataccgatactgacggatcagcacaaccttatcccgcttctctccataaacactgtaaatgatcaccccatccggatgattctcccctgtagaaagcttcatatcctccacactcttcgccctggaggccacaaaataagaaaccggcgtatcatgtacactggtcgcatccactccataaagattcacgaacttattatctgtaagttttttcacactgttgatcttacccatctgaaaaactccttcccgaaaattttttctaaaaacattttatcccatccaaaaccaaaggtcaattttttatacttacactcacttcacaatagtgctataataaatactctgctataaaattaaaaatccacttatcacattaccaaacagctactgtagacaagaaagaaggaaaaaacattgaaaaaccagaccaatgctgcccaggccgaaaaccctctgggaaccgcccctgtaggcagcctgatcgccaaattcgccattcccgccatcatcagcatgctggtcagcgctctgtacaatatcgttgaccagatctttatcggccagggcgtaggaatgcttggaaacgccgccacaaacatcgcatttcccgtaaccattatctctactgctgctgcattgctcctgggaatcggcagcgcctccaattacaacctggaaatgggcgcaggaaacgaaaaaaaagccagctccattgcaggaaccggactctccgcgctgataatctccggtacgatactctctgtcatcgtccttctgttcctgaagccactgcttcattttttcggcggaacaccggacgtcatgccctatgccattgattacatggggatcaccgccattggacttcccttttatgttttaagcacaggcggcaaccacctgatccgagcagacaggagtcctacctattccatgacctgcatcctggccggtgccgccatcaacaccatcctggacccgcttttcatctttggattcggctggggcatcaaaggtgcagcctgggcaaccgtgatcggccagatcgtatccggacttctgatcatcttttatttttccagactccgaaaaatgtacctggaccactccatgctgattcctaaggcacgcaatctgtctgccattttttctctgggaatggcatcctgtatcaatcaggttgccattgctgcagtgcagatcgtcatgaacaatacacttcgccattacggagcactctccgcttacggaagtgatattccaatcgcctgtgcagggatcatttccaaagtcaatcaggtatttatggccatctgcatcggaatctcccagggctcccagcccatctggggatttaactacggcgccgaaaaatacagccgtgtacgccagacataccgctattccgtaaccttatgtactgtgatcgcaaccatattttttatctgcttccagttcttcccgcatcagatcgtaggcatcttcggaaacggcagcgacctgtactttcattttgcagaaaaatatctccgcatcttcatgctgatgacctttgccaacgggatccagcctatgtccgccggcttttttacctccattggaaaagccaggcttggtgtgatcatgtccctcacaaggcaggtgctcttcctgctgccgctgatcgtcatcttcccggtcttcttcggaatcgatggcgtcatgtacgcaggaccaattgcagatacctctgcatttgtgctggccgttgtttttgccagacgtgagcttggagtcatgaaagctgcagaacaaaacgcctgacataaaaaatgccatgtaatttactgcccatcggcaatatattacatggcatttctcacattctcagatatttatctgaaaccaccaatttctgatcttttcttcatcctccggcagctgcttatgatcagtcacccttcagtacaacacggatcttcttataaattacaaatacgatcagagatgtcagtgcatatttaaagatattaaacggagcaatgatcagcagtgcaaaggtaagcagtccgtttacggagccgtgtactgcgcttcccatctggataaaggtctcgattggcattccaaacgccttaccgtaagccggaagcagcacaaaggcattgacaaagcatgcaaggatcgctgtcagaactgttcccactgccatacctgcaactgcatgtactctgctctttttgtgacggaaacgatagatcagaccggccggtaccacataggcacatccaaacaggaagttggcaacatcaccaacaccggcagtcatggttcccttcgtcacaagatgtacgagaatcttcacaagttcgatcaggatacctgccacaggtcccatagcgaaggttcctaccataaccggtacctcggaaaaatcaagctgataaaaagacggtgcaagaaacgggatcggaaactcaagattcattaatactcctgccacagcaccaagcatggctacctgcgcgatggtccttgttctgcttctttccacggcatttcctctctgtaatatctgttcactcataactctctctccttcttcagaaatattcaaagaaaatttccacaagaaatctttatgcgaaaaaaatttctatttcttcacataaaaagccccgggagcttcttcccggggcactgagcacgttctttaaatactgcgcgttcttctctcatccagactttactgtcggttccggaatttcaccagatcagccgccaaagcgggtcgcggactataccgccggtagggaatcacaccctgccccgaagaaattttcttttttatgagttcattataacgcgctctttttataattacaagccttaattctgtcatagaagcattctgctccatttatataaatctaagatccactcctttatgatcaaacccggattttctttaccgtactccagctactgtaaagaaccttttttccgactcttttatatgaccggatgcggacataataggtctttttgtttttcagtcctgatatcttatatctggtcgcagactgttttccaactgtgaccgtttttctttcttttgtaaatctgctgtctgctgcatactggatctgatagccggttgcctgtatattttttttccagcttgcggtaaaggatctgtttgcttttttcagtcctgtcagcagagtttttggaggcaggatcttaaaggtaagcgttttgttgatacgactgtattttccggtccctctgacctgcacagttccaattccggaatttttattatttttgtaatacagcttataagcactcgcaccgatcttctttccatttacagttacggttactgatggccggatggattttcccgtataagtgtaagaggttctgtttagcttgacattgctgacaaacctttctgtcttttttataattttgaaatgaatggttgcggtacctttataataaccggtaccataaatggttaccgttgcaacacccggatactgattatcctcgtagtacatataataatcttcgccggctttcaatccggggattacgatggcaggtgtgagttcttttcctgtatatgtctgatcagctattggatccgcagccggtagttttccgtaaatagtaaaatataatgtttccgatcctttataattgccgattcccgtgagctctgcacgagcttcaccaggcttttcattattaacataggttaccgtataatctttcccccgtaccagtccgtcaattaccacttccggttccactttttttcctttaaaggtggtttccaggtaggtttcattattttccgcaaaatagcacacatacattccattttcatctggcgtaatcttgaaactccgctctactgtaccgcagaaaatatcttttcccgtgatctttatagtcgcagttcctgcattgatgttattttcataagttacttcataatcggagccctgctcaagttccggtgcggattcactggattctatttcaggttcatggctttttccattatattcatattctggagtgatctgttcaaaccattcattctgaagcggtatccggttgtctgctgacagctccacaaacgtgcggccatggtcctctgcgtatttctgaagtgtggaatccttttttcccgcgatcagtgctgaatccctgaacgcatcatccgcccagacagtatctgtgctcagtactcttatcctgcacccggaagacagacaaagtccatttttcccaactgattttacagatgcgggaattataatatcacggatccctgaactgctctggaatgcatattcaccgatttcttccaagccttcgtttaggacagctttcgtaagcgacgaacagtttccgaatgcaccttctccaaggcttctgacacttcccgggactgttatggaagaaacatttacacagtaataaaaagcatagtctcccacgcttacagttccatccgggatctggtaatctccggaacgtccggacggaaacacgatcaattttgtgccatctttgctgaataccactccgtctttttcagaaaaatacggattttccggatctactttaatttctgtcagactggactcagacaagccctccacaaaagcagccagccctatagatgacacatttgggggaatcgtaacagatttcaatttctcacagttgtaaaaagcattcttttcgatggttgtaagcgaatccggcaaagtaacagactctatatcagaagcctgggtgcaatactggaaggtactgtttccaagaaccgttacttttcttccgtcaatagtatccggaactacgatatttgtatctgtcccttcatactgatacagcctgagtgttccatcattcaggatctcataagaatagtcatagtccattttggacaattcataatgtctgggggcatttcccgtatatccgcagtcaaccagatatctttcgccgtcaataatgactacggagttcctgtgaccgcttcctgcccccggatcattggccgcataccttgcatacacggtcagtcccagtttttcgcacatatagttcactgcgctggtattggcccagcagtctccgccgccatccagcatcaggcctgtataaccagaatgatactgactgtaattaaagttgttggcaagccatctggcgatcgtctcaacctttttataatcggacatttccgcagtaatattttctttgagaaatgtatccattttttgttctgcgtaatactccgcataatctttgagtatgaatttataataaacggtactgtttccatcctgtacagagatcagggtctctccaaacatgtattcccactggctctttacgtcatttccgtttttgtctacataggttacatactgcattttaggagtaacaagaccggtttcgctgactttcgcagtataaccggaaacaaccgtatataccggatttttgccggatgtctggatctgataagatgtctgcatggtatccggcatggagatcacactgctgtaagtatcattcatcgcatacagatatatttctgtgctctctacatctgtttctttttcggaagtgcctgctgccggaatatcatctgtgaatatatcttcctgctgctcctggttttctccgtcaccaaaaatttcttccggtgccgcagcctcctctgtatcctctgttccttctgcttttctgatgaccgccgaaggttcttccagaattaatccttcatcagaatcctgttgtatttcctcactctctgagctttcagcttcatccgtttccgttccgatatctgatcccggaaactcttcttctgtaatctgatctgtgctcacggcagtatcttcttccgtgatctgatctgtgtttacggtattttctgattcctcagaattcccgtcatctgtaaaagtatcaatggtgtctgtcatatccgtctgtgcatctgtaaaatcttcggccgccaccggtccacatggaacaatagacatacataatgacagaccaaatgctatcaattttttcggaaatttcatttcgtacctttccttcctttttatgtaaaccgtttatatgtaagttctgtttttattataacgcggccctgtcttttcgcaagctgcaataatgtcccctactctgcaaaaaaccgctgtgatcttcattttagatcacagcggtttatgttttattatcggaacatcagactttccacaatttcagcattactgttctttccatatccgcattcgatcaaccagttttctggctggatactgccaacaccacgttctactgtgatgctgcatgctcatatgcattctgtattcttacagaatatcgatatgctctcctgcaagtgccttgttcatgcttcgtactgcgcagaatttaccacacatggagcaggtatcatcatgctccggtttgcgctcgttccagatgcgttttgctgtttccggatccatggcgcattcccactgtgcctcccagtcaagctttcttctggcatctgccatcttgtcatcgatctcacgggcaccgcggacacctttggcaatgtctgctgcatgagctgcgatcttagatgccatgattccctgttttacgtcctcaagattcggaagtgcaaggtgctctgccggtgttacatagcagaggaatgctgctccggacatagcagctactgctccgccgatcgcggatgtgatgtggtcatatcccggtgcaacgtcagttacgataggtcctaatacatagaacggtgcaccctggcaaatggactgctgtactttcatatttgcctcaacctgatcaagcggcacatgtcccggtccctcaaccataacctggacatctttttcccatgcacgtttggtcagctcgccaagacgtacaagctcctcgatctggcatacatctgttgcatcagccagacatccaggacggcaggcatctccaagggagatggtcacatcatactcgcggcagatatccaggatctcgtcgtagtattcatagaacggattctcctcaccggtcatgcacatccatgcaaatacaagagatcctcctctggaaacgatattcatttttctcttgtgattacggatctgatcgatggtctttcttgtgattccacagtgaagagttacaaagtcaacaccatcctgtgcatggagtctgactacatcgataaaatctttagctgtcagcgtatcaagatctctctgatagtggataacggaatcataaaccggaacggttccgatcattgccggacactcggatgtcagcttgcgtcggaacggaatggtatttccgtgggaagaaagatccatgatagcatgggcgcccatgtttacagcttccattactttctgcatctctacatcgtagtccttgcagtctctggatacaccaaggtttacattgatcttggtgcggagcatggaacctacgccctccggatcgatacatttgtgatttttatttgcacagatcgccaccttaccggaggctaccagcggaagcagttcctctgttgtcatgcgttccttcttagctacgatctcaagctcaggtgtgatgatgcctttacgggctgcctccatctgtgtactgtaatttctcatgtaaaaaaaatctccttccataaattctttgtgtttatacaacaaaaaaccggctgctgcaacgcatacgcatcacggcaaccggctcttactcttacgtacttaatgaaaatcttctgtacttctgatctcttctgtactctctgatcttctgtgtctttaagaatccttcgtgcatatgtccctacgttggcattatccaaatcaggttatgggtcaagacatttacagtctactctcagctcgcttcagcgggcccccctgttttcatatgttggggacgtttgttcgtccatgtggttattatagtataccggctaaaatttgtaaaccacaattctgcattttatgactttttctttcgacataatctgtcattttatctctcaaactccccgggatctttctttacagacattcttccacagctttgctgttccccgtcaggaggacatccgcaatccgcattcactgcttattgcttttcgcaattacagcagtcgatttccctgatccggtcaagctctgcaaggttttctgcacctgcacggcggatccccgcaaaaatggaacccgcaatattgtgccatacactgaagatcgcgcccggaagtgttgcaagcggattggctgcaaaattagctgctgccagtgagacagcaaggccactgttctgcatacctacctctatagctatagctgttgttctggaatactccacatggaagatttttgcagccagaaatcccagcatcataccgcagaaattgtggatcgccactactccaagcaccagaactccacagcttacgatcttctctgcatttacagccacaattcctccgatgatcataacaatagctacaaccgacaccagcggcataacatcggataccttatccacatgctctcccgcaaggctccgaagaaaaactcccaggagaaccgggatcagaattacctttaccacagaaagcaccatggcccagaaggatacttccacccaggctcctgccagaacatatacaagaaacggtgtcatcaacggtgctgccagtgtggaaactatagtcattcccacagaaagcgccacatcacctcctgcgatataggtgatcacattgctggctgttccgcccggacagcatcccactaggatcactcccagtgccagatctgccggaaggttcatcactttacacagaagccaggcgatcaccggcataatggtatactgagccactgcaccgatcaccacttctttgggtctggaaaaaattgcccggaagtcatccagttttatggtcaggcccataccaaacatgatcactcccagaaatacagacgtatagttcgtcatccaggaaaatccgtcacgccagaaaaaagccaggcaggaaaaagcgatgataatgatcccgatatatctggatgctaggctgctgataattccgattttctttaaaacttttcccatacattatacctcgtagctgaagttgtcgatcagtcttgtttttccgatgtaaacagccattgctacaagaacgctgcggtcagctttttccaccggctgcatggtaagtgcatctaccatggatacataatcaatctttgccagaggctctgcttcgatcactgctcgcatttttccgagaagctcttctgccgggattcctgcgtgaatggcttcctgtccggcttttactgcctttgacaggcaaagagctgcttttctctcttcagggcttaagtatgtatttctggaggattttgcaagtccgtcctcctcacggatgatcggacagcctacgatctcaatatcgaagttcagatcacgcaccatcttgcggatgatggccagctgctgtgcgtctttctgtccgaaatatgctctgtccggtgccacaatgtggaacagcttggtcacaacggtacacacacctttgaaatggatcggacgtgtttttccgcaaagtgtctctgacagagtatctatacttacaaatgcgtggggatcatgatacatctcggaaggctccgggcagaagatcaggtctgctcccaggctttcgcagagtttgctgtcacgctcaaagtctctcgggtaggcttccaggtcctcggtaggaccgaactgtgtaggattgacgaaatcggataccactacgatatcattctgctctctgcattttttgatcaggcttgcgtgtccctcatggagaaatcccatggttggcacaaggcctactgtttttccttcttttttccacgctttgatctgttttcttgtttcttctactgtttttgttacctgcattgtgctctcctcttttccggttctggaaccggttttctttatagattcgagatagcctcttttctgaattcaccttcgtcttattatcttcctgatctgcgtcaggccatatccttcagcagtccgtgtttctcataattggtcactctgctgatcctgttctcttcatctacaaatacaactgcaggcttgtgagtacgggcttcttcctgctcgtactgtgcgtaagccatgatgatgatcttgtcaccggtgcttacacatcttgctgctgctccgttcaggcagatcataccgcttccgcgttctccgcaaatggtgtatgtctcgaaacggctgccgttgttcacatctacgatctggaccttctcatattccagtatcccggcagcttccagcagttcctcatccacagtgatacttcctacataatccagttccgcctggacaacggttgctctgtggatctttccttttaacatctctattgtcatcttatataagtcctttcctgcagggaataattatcaagtggataaaagcatccgcttctgtatttaataaaaaaacgtctcggggtacacttcgaccctgaaacgcttctgattgattccctgtatattgagtcctgttttttgtacataaaatgcattcacataatttctgtcattaatacaggctcgtatctttcataatcttttataattttcatatatccgtccgttcccgatcccgggttccggctggctatttttatataagattccagtgatttcagccagagtatagttttgagtccaaatactatctctgtggggtattatcacaccccggcactggtttgtcaataattttcatattctctattatcgtgaatggcagtaataatcccaaaaccagttactttcaccaaaaaagccctcccacacagcaatttctctgccatgtgaaagggctttatctttcttcctttatgcatattatttatgaatatgcacatccagctgcttataaggaatctcaattccataataatcaaaatcttccttgatcctctggttcaatctccatctggctgcccagtagcggtcggtatctacccagacacgaaagcccatgatcacagagctttctgccagctcatctacgaataccaccatctcttcgtcttctcttgtatccggatcttcggtgaggatatcttccaggatatccttggccttctggatatctgcattataagagatccccactttgatctccagccttcgctgatcccttgctgttacgttggtgatggtcgcattggaaagagtaccgttggggatcacgatgtgcttgttatcaatggataacagcgttgtataacaaatctcgaccttggctaccgttccctcgcttccgtcctgtccgttaacgatgatgtaatcccctacctggaacggcttgaacagaagaagcatcatacctcctgccaagttggcaagtccaccctggagggcaagacccatagtaacacctgcagttccaagaagtgctgccagagatgattcctttactccaaagcttgtggatatattaaagatcaggagtatgtaaagtatgatcttgaccagagaggacataaactgtgccactcctgtatccagcctggattttgtcagtgatttcctcacaaactttacgatccatttaattaccgtgcttcctacccagaaagcaacgatagccagaacaaccttgattccgaattttgtgatgtccggcaggtaattttcaaacatctgcctgtactggcttacctgatttccgacctcctgcacggtctgtacagtactatccaaatataatccctgctactaaaaacatatacatatgtgtatatgctagatgatttactacaatctcacgatttgtagttactgcttcaacgtatatgcttttgatgatataaatatcaatctactcacaagttcttgtacactccacagtcgtaaattcccgactaagccatcggtacatatctgtatagtcttgtatatgacattatacagacttcatctaaatagcttttcctttcttaatatttgtttttctttgctacttggttttcgtagacttataccattactcaattacaaccatcaaggttctaccctatagttagcaaggctgtttcaacttgcactggttcatttcctgtaattccagtagttttaagttaccaactagtgttttggattttaaacacctttgagtgtatttactcacatttgttgacatttctgattacatatgtatccctcttgtctgatcgatcattcgatatacatatgcggatcgatctatgtattcctgatgtaaacattccctataatccgcatctggtaatataataatacagcagtggtttttccctgtaaacctgatttctccggttctataaagtatagggtataaaccactgctgtatttctgttatagctttattgtatatctgtccggtaatccgccgcagaatgctgctgaatatacattactgttcactctgttctcagtaacacgcctggcgatgcacagaatttatgctgatcgcataaattcgcgcggtatgtctcggattttctctttatttactgattcccttcatggaaaggctgatacgttttttcttcatatcaacaccaagaacacggacatccacgatatctcccacactgactgcttccagcggatgtttgatgaatttctcgctcatctcggaaatatggaccaggccatcctgatgcacaccgatatccacaaaagcaccgaagtcaatgacattgcggacagttcccttgaggaccatgccttctttcaggtccttcatatccaggacatcggtacggaggatcggtttcggcatctcgtcacgtggatctctggcaggtttttccagttcctttacgatatcacgtaaggttggctctccgatctccagctcctttgccagttttccgtaatcgcggatctgcccagaaataccggtaagcttacgctctgccacatcttccggtgtgtagcccagcttttccaggagtttttttgctgcgtcatagctttccggatggacactggttgcgtccagaggatttttgcctcctgtgatccgtgtgaaacctgcacactgctcaaaggctttcggaccaagcttggcaaccttaagaagctctcttcttgtctggaaacggccgttttcctcacggtaagctacaatattctttgcgatggccttgctgattccggaaatatactccagaagggatgcagacgcagtattcagatccactccgaccttgtttacacaatcttccacaacgccgttaagggcttctcccagctttttctggttcatatcatgctgatactgaccgacaccgatggatttcggatcgatctttacaagctctgcaagcggatcctgtacacgtcttgcgatggatgcggcgcttctctgtccaacatcgaaattcgggaattcttccgtggcaagcttgcttgcggaatatacagaagcacctgcctcgttggtgataacatactggaccttttccgggatttccttaagaagctccacgatgatctgctcggattctctggatgccgttccgtttcctacagagatcagtgtcacatgatatttgctgataagctttttcagggtttcctttgcggcacggatcttggtctcattggttggtgctgtgggataaataactgtggtatccagaacctttccggtaggatctaccactgccagcttgcatccggtacggaaggcagggtcccagccaagaactacctgtcctgcaattggaggctgcatgagaagctgctccagatttttgccaaagacatggatggcaccgtcctctgctgcctctgtaagggcgcttcggatctcacgctcaatagccggtccgatgagacgtttatagctgtcctcaatggcttctttcagaacaggtatagtgtatggattatcgcggacgatcacctgtttttcaagataacggatgatctcttcctcaggtgcaaggatcttcacagtaaggaatttctctttctcaccacggttcagagcaaggacacgatgacctgcaagctttttcaccggctcctcaaagtcataatacatctcgtatacagactgctccttctcatctcttgcggtggaacatatagttcccttatccattgttctcttacggatactgatacgataatctgcttcatcagaaatgtgttctgcaatgatatctctggcaccgctgatggcctcttccacagttttgacttctttttcctcagaaagaaatgcttttgcctcttcttcaagaggtttcttcgtcatctggagaaggatgatgtcggccagcggtcccagacctttttccctggcgatgatggcacgtgtacggcgcttcgggcggtacggacggtaaagatcctctaccacaacgagtgtctgcgctgcctcgatctgtttcttcagctccggagtcagcttgccctgctcctcgatgctgctcagaacctgagcctttttatcctcaagatttcttaaataagtaagtctctcattaagattacgaagctgttcgtcgttcagtgtaccggttgcttccttacggtatctggaaataaaaggaatggtgcagccttcatcgatcagcttaaccgctgcctcgacctgccatttctcaacgttcaattctctggtaattacctgaataatatccatttttatctttctcccgttgtttcaaatttgcctgaggctgctttttcctctttacacagcttctgacatttatcaaagatcaatctgtgcgatcacgtccttcagagcattggcgcttgcatgaagcttctctgtctcctcctcggtcagcggaacacgaacgatacgttttacaccttccggtccgatagaagccatggtactaagacatacgtcttcaacaccgtactctccgtgaagcatggttgatacactgactattgtatcagatgctgcaagaagaagcgagcaaagtctgcaaacagatacggctaccgcataaaatgtagcacccttcttggcgatcactgttgatcctgaagtatgaacatactccagaacctcttctctgtcaagtggctgcagatctttctgatcctcatgaacgatcttgtcaaattcatcaagggtcgcacctgcaacaaaggctctggaccacggtacaaaggaagtatctccatgctctccgaatacataggcgtggatgtttttctcagatacaccgtagtgctgagaaagtctgcagcggagacgggccgtatccagggcggttccggaaccaaggatctgattttccggcagtccggaaagctttgcaaatgcataagtcataacatcacatggattacttacaataatataaagcgctttgggagccacctttacgatctccggagtaatactcttcataatgttgacgttggtctgtgtcagctcgatgcgagtctgtcccggttttctggcaataccggaagtgatgatcacaatgtcagaatctgcagcatccgggtaatctcctgccacgatggagatcggctcacggaaactggttccctgctcaatatccataacctcaccttcagccttatctttgttaatatcgatcagaacgatctctgatgcaatactcctctgtgataaggtataagcgatagttgctcctacacttcctgctccgatgatcgtaattttactgctcatatttgttctcctttcagcgttgtttgtcattttaataacaactttaattatacacattcaaacataacataaaacattgccctgtgcaataaaaattttattgtatttctcaggttaatccccgctaatttgcatttcaaattatttaaaccgcttatattttctgatatttttcctattattctgtatacattcctgttatttttttatcgatttatagaagcaatttcagaaacctagcaaaaaacctctgaacttcaaaaaaaatcaagaagtccagaggtttctttcacctcttattattggcttagattcagatgtttatagctgctccaacgttcacccggttaattctttgcctgggcaagggctttttgtgcagcgtccaggatcccttcggaagaatatgtggctccgctgacagtatcgattccatccgccgactggtttgccatgatctgagaatagatcgtgctccatgcaggatcaaaaaattccggtgtatcctgatttgtctgctcaatggatacgatctggcctcctgagatcgtaattatcagatatgtttttcctccatatccaaaagccgagcctgtatacgttccatctctgtacattcccaccggttccggtgcttccgttggctccggtgttgcatccggctcatctgtccctggtgttggagttacattgggtttttcaggaaccggcgtcacatccgggtcgtccggctccggcgtcggggttgctgccggcgtctctgttggcttcggtgtggctgttggtttcggcgttgccgtaggtttcggtgtggctgttggctttggtgtcggtttctttgtcggagttggtgtcggtttctttccatactccggattgatcgcttctttaagagctttttttacagcgttgagaattccgttggaggaataggttgctccgctgactgcatcaatatcatctacagaatccgtaccaatgatctgttcctccagcacgctccatgctttttcaaaaaactgctttgtgtccgtattttcctgtttcagagctttgatcactccatccttgatggtcacaattactttcacgtctccattgaagccctttgccgaagctgtatatttaccatccagatattttttgggactgtccggatcttccggttcctttgtaggagatggttttttggatggtttttttgtaggtgacggagctaatgtcggagttggtaaaacagttgccgcaggtgtagtggtgacctgctggctgtttccatctgccgctgcctgggagagggcattctgaactgcctggatgattccgttggaggaataggttgctccacttactgcatctacattcggtgtatttccggcgatcatcctgctgatcacaccctgagctgacgcaaaatacgacgcggtttctccagatgcctccagaatatctatggctgcaatctttccgccgctgattgttactctcacgcggatcgtcccgccaaatccggttccgcttccttcatatgtaccgtccttatatccatctgccggaacgcttgctaccggtgtctgcgtggttccctgtcctgcggcgccggcattgctttttgcagattcggaaaccgttcttgtaccggagctttttttcgctgctgttttttttgaactttttttcgatgagcttttcttttttgttgtactttttttctcagctgtgctgtcagaaacagtattttctttttcatacccgagatatttttccagctctgaagcggacattacggtcgtctctgcctgcccgactgcttctgtctctacatcagagcccttcgcctttatgcctgaaaacacaagcgccgcaatcacagcagctgcagggaccagcttggtccagggtatcttcggagtatttttttcctcctgctttttatctttcagatctttttccatgcttccttactctctcctcttttcttgcggcctctgtcagacattgctcttcagaaatcagcagacctctgccgcagacattgctctatgtctgcggcagaggctcccggatatctgtgctcgcattcagttcaacagcgaaattatttaactgttaccacaaatttctttgtaattccgttgcatttcactgtgatcgttgctttaccttttttgattccctttacaacacccttgctgtttacagctgcaacttttttattgctgcttgtatatgtaaccttgcctgcaggtgctgctttggatctgatggttgttgttttaccttttttgatcgttgcagaagattttacaagactgaatgcaggattcttgacaactactttgcaggttgtcttcagggctcctgcctttgctgtaatcgtaacggttcctgctttaattccttttacaacacctgttttactgtttacggttgcaacctttgtgttgctgcttgtgtattttacagttgcagatggtgttgcagttgcttttacagttgctgtttttcctttgtagatcgttacggaagcctttgcgaatttaattgtagaagcttttactgttaccttgcaggttgctgtggcatttccgacctttgctgtgataactgctgttccggcttttacgcctttaacaacacccttgctgcttactgttgcaacctttgtgttgccggacttaaatgtcactgttgcatcgctgtcatttgttgttgccttaagagtcgttgtttttcctgtatatacagctgctgctgtcttatcaaatgtaactgttaccttctgaagctctttctctgctccctgaagatgttcaagtgcttcatttacctcagcctgacttgcatctgtttttgcaagaatgtcttctgcttcctgaagctcaccggcaaaggacttccaggttgcaattgtgtaatctgcctctgccagagcctttgcagcttccacttctgttttaagacttgtaaaatcagttggctccattgtaggatttacgatattctctgcagttgcctggaagctataggtatagtcattatatccaagagcatacactgtcagtttccagtatcctgttccgtctgttcctcccggaagcttgcagcgtgcagattttgtaagtccaagctggattcccattgctttatgcatccagttatctgcggcaaacttggttccataagaagcgaggcattttgtatatgtggaatcatctccataataatcccagcgtacagcctgcatatttgcaccaagatcaccataatttccattgagatccacacggaggaattcgccgtagcttccgcttgctgcttttacactcggcttgatctctgttgctgtttttaacgcctgatccttgataccggaagctgttccgtctgattttcttgctgtaaatgtaaagccgtcaccatttttctccgcatatttcagaccatttgtctgtgcatttacgtctgccacaaggcctttgtaatactggagattgttttcactgtatcctccggagagcacagctccatcctgtacgacattatactttttgcagaaatctgcaaaatctgcggtcttaactgctaccgggacatatttcagaccatatatctcataatgatccatcgtataggtttttccatcttctgttgttatactgcctctgttccattttaccttggaaccgtctgtaagataaagtgtgcttcctttatcctcccagtaggatacgtcgaatctggttccgtcttcagcaatgatcgtagcttctgtctgatagcttcctctgtgaagtccatgatttgcagtcgctcttgttactgtatcaaaagctcctgtatcaaactcactatgtgaatccttctcttctgaagagcttgtatctccagctgcatatacgccttctgctgcccagtactcaccccaggtaagtcctgcatatacgtactgatactcgcctgtcagctggtcagaatcggaaaatgcttccgccacttcatcgccttctgtgaaattctcttcccctgtagagaacgggtctgcttcctctgctgtatcttcctgctggatatcctctgtctcgtctgcagcagcttctggcactgctgcatcctctgctgcttcttctgttatgtctgcagcatcctctatagcttcttctgctacagcttcagtatcctctgccgtttcctctgtgctaaaatcctccgtatctcctgcctctgcctcggaaaccacggctgcatcaagatcagatgccattacagcggtcggaaaggttgttgctgccactgcaagacttaaaatgcatggagctgtttttttcaatagattccacttctgcattgcttattcctcctaaaaatatgatatatttatagaaccctttccaggtttactatcgcaagtactgcggatatgagcattcccctctgccaaacaatcataaaccggatcgccgggagatcagcttcactctgcaatatcctccacactataggaatccgcaagcaggctgaaccgctccttcatcccctcagtgagatatacatgatggtcttcatccacaaaaagtccgtctgcaccgtaagctttcaacagctgtgtccctttttccacccccagcacaaaacatgctgtggaaagcgcatctgcctccagacctgagtcacagactaccgttaccccggtcactccgctttctgccggatagccggtagacgggtccataatgtggtgataccttacagcattttcgataaaatatttctcataatctccagatgtggaaagaaattctgtaccatttaaggcaaccacaccaagatagtcatcctcattttcagctctgggatctgtcactgccacattccaggaagaaccatccggcttgcttccgtaggtcatgacactgcttcctcccagattcataagtgctgctattacatccttctttgtttccagttctttaaggatccggtcacagccaataccctttcccgctgctccaagatccagagaacagccctcctccatgtggaccgtatttccgtcaagaaaaattttctgatatccggaatccttcagaacattcttaatttctgcttcttccggaattttctggttttcccctccaatatcccacaggcggatcagcttcccgatggttgggtcaaaggctccgtcagaatcctctgcgatcttcagaagacgtttcaggtatccggaaagctcgtcggaaatctccgtatcttttccgctgtctgcattcaccttatagatctgggacttctcattggtccaggaaagaaggttcgtctccacatctgtcagcacagctgtcagcttactgtttatatcgtcacctgtggtatagagtgtttctgataccacagtatccattgcaaaatctgtatcggtatatgtctgtacatcattttccgaagcagccatgcacagcacaggaaacaacaccgcaattcctgtaaatgtagctgctgccagaaaagttttctttttcagagcctgatatctcatagatcatttttcctcaattattccaatgtgaatattttttctcgggcatgctgcggcacatgcgtggcagcaaagacattcgccggatctgcctgtgtcgccgtcgatatccagatgagccggacatctttttttacagagaccacatttcggcggacatttctcacggtttctccgaaacagtgcacccggaaggattggcattaatgcaaaaaccgctcccatgggacagagaaactggcagaaaaacctttcctgtgtacacattcccacaatgatcagcaccaggagcacaattcccaccagatatttgctgttcgggagccgtcctgccgtgagcatggaaaaaacatcccacgggctggttcccgtaagctttccgtatacacctgtaaggcaggaaagcaggatcagtgccagtacgatatatttgactttctgaagcccgtgaaccattttttcggaaagagccggtttcttttttttgtgaaagcatttcatccggatccaggaaaagccttcatatacggcatctccgaaagatccgaatgcacacgcatatccgcagaaatgtcttccgaaaaagcaggtaaagatcagaagcactgccgttacagtcagaaaggaattccactccaccggctgaccggccgcaatggcaagaaagatcgatttgatacctgcaaaggctgtagaaaacagagacggggcggcaataaaaaatgccagctgtattcccgcacgcatcagccttacctcccgctgtctttttttcatgagttttccgcctttccaagtgccgcatccactgcgttcaggattcctgtggagctgaacgttgctccagatacggtatccacatctgtactctgagcactcaggatggaatcgatcacactctctgcctgtgaaagatatgcactgtcctcacctggggcgctgactacgttgatggatgtgatctcatcaccggtaagtgtcacctccacctgaatggtcccgccgtatccctcggcttctcctgtataggttccatctttatatacattatcggaatctgcggttgctgtgtcctctgcgtctgcatcggatacattgccatctgaagtgtctgttgttttgtcatcgcctgctgcatctgcatcactgctgcctgattctgcagatgctgcctgattctgcatacgatttacataactcgtctccagcgcactgagaagttcattctgctgctcctgaagtgtatctaccttatctgtcagagccgcgatctctttttcatttgcctgggctttcatgctgctgttataaaaaagtacagccaggatcaccagcagtaaggagatcactctcatataaaaattcagatttttcatctcttttctcccttgtatttttaacaattctgtaaattgctgcatcagactcacgctatgcgaacatatattgctacgtcagatgctctcgatccagtcctgtaatctgcgtataactgtcttttggacaaattatatagtttttatccatatatataaattagttttgattaatcttttttgcaaaattagacagtgctaacttacagttaggtattatatcacctgttttttttcttgtctacacttttgttagtagtttataactttttccaatatgaatttttctgttttatgtcttttataaaagaaaaatcatcaccactcctccctttccgttgggaacagctgtatgaattatggttagatatcattaacttatgtttgccttttaatttcgattatgatatgatttttctgaatctgtaacagaaatggagatttgttttgaagaaaaaagaattgatttttattgccgggatcctgattctggctggggttctctggcttggttttcagattgcggggaaacgttcccataatacgatccgtattaccgttgacggaaaagaattcggaacctattcgctttcccaggaccagatcatccacatcggagacaccaatgtctgcgagatcaaagatggaaaagttacaatgatcgaagcaacctgcccggatcattactgtatgaaacagaaggctgtggacgagcacggcggttccatcatctgccttcctaataaggttgtgatagaaggggaaaatactgcagaggattcggattcggatagttcgcctaaaattgatgcggtgacataaaatttccggagaatatgcgtaatacgtgttctccgtagagttttctctgacagacggtattctgtctgtgctgtttctgcaacgatattcctgcaacaaatgaaaggatttatttatgaaacgaaaaacagcttatctcggattatttgccgcagtagcaatcatttttggatatgtggagtctctggtccctgtatttacagggattccgggtatcaagctcgggcttgcaaacctggcggtgctttttatactggaccgatattcctttaaagaagcggctctcgtgtccgttgtcagaatcctggtgatcggatttatgtttggaaatctgttcagtattttgtatagtctggctggcgctgcgcttagcctgactgtgatggatcttttgaaaaaacattccggcttcagtctgatcggtatcagtgtggccggtggtgtcacacataatatcgggcagctgatcgttgccatgatcgtggtgagcaatacgagtttgatggtttatgcaccggcactgctggtagcaggtgtcctggcggggattctcataggtgggttgacaaaggaggttgtgggacgacttcctttgaatctataattatgtggtttgcttcttggattatggttttcacttttttaagtgaggggaaattgtgtggtttgattttttagattatagttttcactttttgaagtgagataaattgggtagtttgattttttgggattgtagttttcaccttttgaagtgagaggaaattggatggtttgatttttttggattatagttttcactttttgaaagtgagataaattgggtaatttgatttttttggattgtagttttcaccttttgaagtgagaggaaattggatgatttgatttttttggattatagttttcactttttgaaagtgggtaatttgcgagaaggggaagcactcatagttgcgaaggccgtctccccttctcgcgctcttcccctcctggccacgccgctgtgatgcgttgtggaatgtgcaagtgtatcggctcagtcctgtattctgctgtatcggcagtgacagactgagccgattattgattcggccatgtattctgctacactggcagtagcaggctgagccgattattgcttcggccatgtattctgctgcactggcagtgacaggctgagccgattgttgcttcggcactgtttattgcttctggctgaatgggaaagtggactgcgtagcgggcttgttctctggattgtggtgtatcgctgttattcaggaacaggcttcgccaatatatttacgtcagcataaatcggctcaaccttccacagccaacgtagtagaatccatcgcccctccaatatcttcacatatttctacagcctacaatagctgcgtgcccggaaagggggagctcgagggggaaaagcgggcttcgcaactttgagtgctttccccctcgtacctgcccatgccaaaatggtccccctgaaagggaaagtacctgcgtctcatgcatcccccggaaagggcatcacctgcgtttcaagcatcccccccggaaagggcatcacctgcgtctcaagcatccccccggaaagggcatcacctgcgtctcaagcatccccccggaaagggaaaacatcctccggaaggcgatcaggcttcggtttcatcatggaactgcggaatcggagttaccggaggatgaggctcctccggaggttcatcgaactctccggaaatattccgatagaaaactgccatacaggtttctatataaggcaccagccagatcagtgccagatacaatgtaaatatggaaaaaatgatccacggaacaaaacttaagagcattttcatatattcccagtaatgtcccttcataagctttgcactggctttcagtgcctgtactccttttatgtccgaattatcggacaggatgtaatagctcatggtgaacggcatagctgccagcaggttcagcgcgaacccgagaagtgtgagcagcatgtaagttactgcccagttcatctgctcctccgttgtatttcccatattgcttgtaaaagaaaaccacgccagtggaagtgatgtcaccagattgatcaatgccagcacaaaggatgccacgatcacatgatccggctgatggctgaaaaagtacagaaggtctccgaaagagtaggcttcccttctggaaatattcagatagatccggtaaagtcctgcggaaaaaatacagatcaccagagaaaggacaaagctgaatacctctcctccaatgatcgcatacagggaatctcccggaaaaagtgctgtggaaatatagcttgaaactgcgctcatcgccgcaaccgcaatactcccgatcacagggaccgtaaaattaccggccagagtttcccctgccagcttcttacagcccttcagattttttctcataattctgtatcccttcgttatagaaggcggagactcatccaagcctccgccccgtcattttttacttcagataaatcatattctcatatttcacatctgtttagtctgcaagattaaacgcatcatgtaccgcattcatggcacgtacgccatctttctcgttaatgagaaccgtcacacgaatctcagatgttgcgatcatattgatgttcacaccctcattgtaaaggctttcgaacatttttgcagcaacacccggattgctcatcatacctgctcctacaatagaaagcttggcaatgtttttctccgcatgaagctcagaataggcgatgcgtgcctggttagcttccagaacacccattgcatcgtccagatcatttttatcaacagtaaaggaaatgtccttggttccggcacggccgatagactgaaggatcatatccacattgatatttttcttagccagggtatcaaaaagcttaaatgccactcctggtgaatctttaagtccgatcacagcaatacgtactgcatctgtatccagagcaacaccgctgatcagcattctctccactgttacttcctcctttaccacagttccttcgctgttgttgagactggaacgtaccaccagcggcacgccgtatttctttgccatctccacagaacggttatgaagcactcccgcacccagagttgccagatccagcatctcatcgtaagtgatctccttgagcttgcgggcattcggaaccttacgcgggtcagcggtataaacaccgtccacatcggtatagatctcacaggcatctgcatgaagcgctgccgcaagagctacggctgtggtatcagaaccgccacgtccaagtgtggtatagtcattatatttatcaatgccctggaagcctgtgaccacaacgatcctgcggttatccagctctctgcggatacgtgccgcctcgatctttttcaggcgtgcgctgccatgtgcacttgttgtgtgcatagctacctgaaaagcgttcagagaaacagccggtactcccagactgtccatagccatggacatcagtgccactgacatctgctctccgatggtaaaaagcatatccatctcacgtttcggaggtttgtcattgatatcctttgccatggtgatcagctcatcggtatacttacccattgcagaaagcacgatcaccacgtcgtttccttttttgtaatcttcgatacatcttctggcaacattaaagatacgctctttgtttgccacagaagtaccgccgaatttttttacaatcaacatgttcttttcttcccttcggcatcaatcctttacacggatcattgccagtacttttccggtgagcttgctgatcttctcataatattcagcctgcttcatcaccggtgtgataaatccgaattcgtccggaaggtcatccggctcgatggtctgtacatcaccaaaagctttttccacttcatccatagtagtatcagacacacgtacgaagaaacgtccctcaacttcatccatatccataagcttcagggcatagctgctccagtttgtcatgatatttctgtggagatgctttgcttcatccacaacatctgcaactactgcacttgcagtcggaagcttacctgctccgcttccgtagaacatggcatctccaagaacatttccgtgcacaaatactgcattaaacacatcatttacactgtaaagcgggctactctggcctaccaggaacggcgctaccattgcatagaaagaatctccgatcctgcggcttgtggcaagaagcttgatggtcatgccaagctcttttgcatattccatatctgccggtgtgatctttgtgattccttctgtataaatatcctcgtaattcaggaattttccgtatgcaagtgaagaaaggatggcgatcttacggcatgcgtcagcgcctcctacgtctgcagtcggatctgcctctgcatagccctttgcctgagcttccttcagaaccgtatcaaaatcacagttctctgtgctcatcttgtaaagcatgtagttggtggttccgttaaggattcctgtgatctcatcgatctcatctgctgtcagtgaagaattcagtgcgcggatgatcgggataccgccgccgcagcttgcctcaaaaaggaagttgatatttttttcttttgcgatctccatgagctcggaaccatgcttggctaccagagccttattggatgtgcttacgctctttcctgcctgaagcgctctttttacaaaggtataagccggctcgatcccgcccataacctcaacaacaatatctacctccggatcgtttacgatcacttcataatcatgaaccagaactttctcaaccggatctcccggaaaatctcttaaatcaagaacgtacttgatgttaatctcatctccagctctcttgttaatgctctcatgattggtgttgatgacttcaacaactccgcttcctactgtaccgtagcctaatactgctatgtttatcatatgcttactccctgcctaaaattttcaaatagtgtataccgtctctctgctcaatatcctccaccatagcctctgcgtcgccttctcccggaaggatgtcaacgctcagcgtcagtgttgcgactccgttaatgggaatactctgatgtatggtcaggatattaccgtgaaaacgggcaatcgtctgcagcaccattgataaaagccccggctcatcgtccatctgaatgataaaggtgatggtctttcccttggtctcctcgtggaaaggaaaaatatcgtccttatatttgtaaaaagaactgcggctaatcccggtcctttcagcagcttcctgaacagtagccacccgtttggattccagcaatctcttggcctcaaccaccttgagaagtacctccggcactgcccgttctcttactacatagtattttttcttttcaacctgtttctgcatagcaacctctctgactgctgttcacattgcggccagcagccttctgtccgtttcataaagacaactgtttttgtacaagagatatattatcataataaaagaaactccacaagcgcttttttgcctgcggagtccttttctctgtctttatggggttccgtgacagtaatgttattctttctttttcgccagcgcaatccatttcaggtatgcattgataaaaatgtcaataccgccgtccagaactgcgtcaacattaccggtttcttcattggttctatggtcttttaccatggtgtatggctgcaggacataggaacggatctggtttccccagccgatatctgtcacttcgcctcgaatgccggaaagcttctcctcggcttcctgctgtttcagcagatacagcttggccttcagcatctgcatggccttgtccttgttcatgtgctgagaacgttcattctggcactgtaccacgattcctgttgggaaatgggtgatacggatcgcagaggatgtcttgttgatatgctgtccaccggcaccactgcttcggtaggtatcgatacggatatcatcgtcattgatctctacgtccagatccttcttgatatccggcataacatcacaggatacaaaagaggtctgtctctttcctgctgcattaaacggagaaatacgtacaagacgatgaacacccttctcggatttcagataaccgtaggcgttctctccgtttacctggaaggttacggatttcacaccggcctcatcaccgtcaaggtaatccaggacctccagcgcaaagcccttcttctccgcccatctgctgtacatacggtaaagcattccgcaccagtcgcaggcttctgtaccgccggctcctgcgttcagcttgatgatagcattctctccgtcgtactctccggaaaggagtgtcttcacacggatgctgtcaaagcttgcctggaactcgtccagcatttcctggatctcagggacgatctcaggatcattctcctcatatcccatctcgatcatggtttccatatcttccatctgtgtttccagattatggtatgtctcaatatcgtccttgagactctttaactgtttcatcttcatctgggatgcttccgcattatcccagaaatcaggcgcctccatctcgcgctctaattcttcgaccttctgctctttgttagcgaggtcaaagtgaatccctcacttccactaatggctctgtgtatgttgcaagaatactcttgaactgatctaactcaaccacagcttcaccttctttctatatattgatacaggatttcctgcctgtcttatacaataccatatgggcatggaaattacaacgaaaacgtggtcagggcgtaaatatcccctctcctgtgcttcagaagcggcagctgctcacggactttttttacctcgtccagttccagttccacaaccttcacagccggcttctcttccatctccatgaggacttttccccaggggtctgcggcaatggagtggccccaggaatgatacccggcgttcaggtctctggcgggggcagctccgatggtgtatacctggttatccacggctctctggcggaacatcagctcccagtgaaggggccctgttgtcatgttaaaagcagccggcacgatgatcacctgggcgccttcgtccaccatcagcctggcaagctccggaaaacggaagtcgtagcagatgcaaaggcccatctttccaaattctgtatcaaaaaccgtcacctggtctcccggtgtcagggtatcggattctttaaaatactgaccgccttttacatcaatgtcaaaaagatgcatcttccggtgcttaccgatctgatgaccatttctgtcaaagacataggaagtgttataaatattgccggcttcatctctctccggcatacttcctgctacgagataaattccgtgttctgccgccagtcgggaacatttttcccaggtatctcccctctctggttccgcgtactccgggaagtatttgttctcgtaggggcagcagaacatttcgggcaggactgccagatcgatcccctgaagctccgggctggcaagaagttctgctgcctgggtgatattgcgaaatttatcagtatatacatgtgtctgaagaattgcagtttttataattgccatattatcataccccttctcttacagcgaaaattaagtatctgccatattggcgcaggatgactttcttatatgcagggcgagggaatgaagcgtatcggtggctacggcgattgacgacaacgcagcatatgaaaaatcagacaagtctatatgacggttacttaatattcgctgcactctattcctgtgtaacagaaattccagaaaaaatagccccaccgcatcatccgggtgagactatttttatctttattctcagatcttggcagccttacgtccgcaacactgtttgtatttcttgccgcttccgcatgggcatggatcattcgggtatactttatcttcttttcgctgaaccggtttcttcgggcctgcgctgttatctttgtttgtgccggttaccttagcaacctgctcacgctcgatcttctgctccacatgaacatgatacagcatacgtacagtgtcttcctgaatggagctgatcatgctgttaaacatctcgaatgcgttcatcttgtactcaacaaccggatctctctggccgtatgccatcagaccgataccctgacggagcatttccatatcatcgatgtgatccatccatttgctgtcgatgcatttcagaaggacaactcgctcaagctcacgaagctgttccggttccgggaactcagcctccttcgcttcataaagcttcacagcctcttccttcacaatatgcttgatctcgtctttcttatggccttttaccttctctgcggtcagcgggtggatcgggatgatcggagtgatcgcagtgttgaactcattaagatcccactcagaagaatccatgtcatcggaaaagcacatgtctgtcatgctgtctacgatatctgtgatcatcttatagatggcatcacgcatattctcaccgtcaagtacctggcggcgctcctcatagatgatctctctctgctcattgttaacctggtcatagtcgagaaggtttttacggataccgaagttgttgaactcgatcttctcctgggctttctcgatggcattggaaagcatcttgtgctcgatctgctcattctcctcaacaccaagggatgtgaacaccttcatcagtctctcggaaccgaacagacgcatcaggtcatcctcaagggaaatgtagaaacgggattcacccggatctccctgtcgtccggaacgtccacggagctggttatcgatacgtcttgactcatgacgctcggtaccgatgatcttcagaccgccagcctctcttgccacatcgtcaagcttgatatcggtaccacggcctgccatgttggtcgcgatggtaacggcatctgcctgtcctgcctgagctacgatctcagcctcaagctcatggaacttggcattcaatacattgtgggggattccctctctcttcaacattctgctgagaagctcagaagtctcgatggtgatcgtaccaaccagtaccggctgatgttttgcgtgagcttccttaactgcctctacaacggcgttgaatttctctttctttgtcatgtaaacagcatcgtcaaggtctttacgctgtactacacggttggtcgggatctctacaacgtccatgccgtagatatcacggaactctttttcctcggtaagggctgtacctgtcataccgccttttttatcatatttgttgaaaaagttctggaaggtaatggttgcaagagtcttgctctctcttttaaccttcacatgctctttcgcctcgatcgcctgatgaagaccatcggagtaacgacggcccggcatgatacgaccggtaaactcatcaacgatcaggatctcgtcatcttttacaacataatcctgatccttgtgcatcagattatgtgcacgaagtgcaaggatgatgttgtgctggatctccaggttttccggatctgccaggttctcgatattaaagaatttctcaaccttcttgataccctgctcggtaaggttgacgatcttatctttctcatttacaacgaagtcaccggtctcgataacctcctcacccatgatggctgccatcttggtcatctcatggctggcctcaccacgctccagctgctgtgcaaggatatcgcacacctcataaagcttggtggacttgccgctctgtccggaaatgatcagaggtgtacgtgcctcatcgatcaggacagagtcgatctcatcgatgatacagtagtgaagatctctctgaacaagctgttctttatagatgaccatgttgtcacgaagataatcaaatccaagttcgttgtttgttacgtatgtgatgtcacatccgtatgccgcacgacgctcttccggcttcatgtcgttaagtaccacgcctacagtcaggccaaggaactcgtgaaccttacccatccactcagcatctcgttttgccaggtagtcgttgacggttacgatgtggacaccttttccctcaagggcattcagatatgcaggaagtgtggaaacaagagttttaccttcacctgttttcatctcggcgatacggccctggtgaaggatgataccaccgatgatctgtacacggtaatgctccattccaagtacacgcttggctgcctcacgtacggtggcaaatgcctccggaagaagatcatccagtgttgcaccttctgcaagacgtttcttatattctcttgtcttgtctcgtaactgctcatccgtaagctgctgcatctgagactgatagctctcggttttttcaaccagcggcatgatacgttttacctcacgctggctgcgggttccaaatacttttgaaaaaacattcatgtttctgctccaatcattttattcgaataagactgctgtctctgatctgtccaattttggatcattccagttctctgttgatatccgttatactggatcacatatggtatatattctaccactttcctgttataaaaacaatgaacaattatttaacaaatcatgtcaggaacaacagaaaatatcccgcataggatcctgttttcgaggatcccgcgggatattacagatcttatttccttacttttgcattttttacactgctccaggcaccgtaatatgtctttccgctcacttttttgtatgcacggatacgaacataataagtgcttccctttttcaaaccggaaagtgttcgggtcagtgcactggcggacactgtcctggaccctctcatggaccttgatgccgcatactggatctgatagccggaagcaccagctgcttttttccagcggacagtcagcttcccggaagccttgctggacggtttgtactgcaccggagctgtcagacggacgatccggctgccgtttttgttataagcacttaaagcagagcccttgtatgcgcggactgtataagtatacatggttcctgcttttactgatccgtctgtgtagaccagcgtattgcttccgcttacggtagcgatattgacccacttgctgctgtttccggtccttcgatagatcttatagccggaagcatttgcagcttttttccatttgaagacgatgccggcagggctgttggaagtgccggataacccgggcctggtaagctttaccgttgtaagggccgcggaccggaactggtatacggctgactgtacttcatcagtctttttccattcagctttctgataaacatacttctggaaaaagatatacatgttataagttgcggctttgtttattcctttggcagatccgatccgccatgtagtattcttcctgttatcggttggatttggtgaagtactccagtaaactggcacccacttcacatctccaggcccgggatttgtattcgtagttcccgcaccgatcacagtaaactcataaaatgtattcggagtaaatttcagcggagattccaaacctcttaaaacactatctctggaattatatactttcggtgtataggctggtgtcggcgttacatcatatttcgggcgggtccccctgtaatttagttttaattttttcaggttgctggttcttccgtctgaacccaataccttaagatacagatcaaattctttctctatatccagattcttaagatatatcacaaagcttcggtctgtagtaaccaccacatgagagtttcccatatcaagcttcggaacatcagatgttccgtccttttttctcgctgcagctttgtagtaacaggctccgtttgcatcaacttgcagtgtcacgtttacagaactgcggcttacccatttttctccggtccattttacgtttattttgggcaccggtgttggtgtcactgtcggtgtcactgtcggctcaggatccgctgtcggtgtcactgccggtgtcactgtcagctccggatctgacgttgacgtagcttctgcggtttcttcttccatactgtcttctgcaggctgctcggtctctcccataggctctgtagtttcctctgctgaaaacatctcctggctgttagcagcattttctacgatttctgcatcaccgctgccaaactctgcagccataccggttgccggaagcaacgtcacacaaagcgcggcacttaaaaaaagtgccagaacttttttcttcatttaccttcctcctcgcatatgtcttcattatataggcgtttgcgaaacgccacaagccgcataaatacggcattttttgttacctataaacaaataactcctcaccggatatggtataatagagttgactaaaaactataaacctacatccaagaaaggagttattctgatacttatgataccatataaacagctttctttggcagatattttttcagattgccatgaaaaatttgaaaatgacaaacctgcttttctttctctattagaaacccatatcgatattgatgagttaattccgatttcttttagaaatcatttctatgcatcgacgggcagaacccgtaaataccctttgcaagcttttctgtgggctttgattattcaacgtattttctctatccctacggatcagcttctcctgacttttctcgcttactcaaaatcacttcgggaattctgtggttttactaaagtcccagacgcttccaaaatcacccgattcaaacaggattttttagatgacctccagcttgttttcgataaccttgttgatgttaccgagcctatctgtcaggcgattgactctgcaaaagcggatatgaccatctttgattcttccggcatagaagcatttgttaccgaaaataatcccaagtatgctaacaggatcatcaaacagcttaaggcatacgcgaaagctcagggctttgataaatcctatgatccttataaagctgcctatgattccatgccttctcatgcttctgctaatcctgagattaagcagctctatatcaatgggcatttttgctatgtcttcaagttcggcattgtcactaacggattgggcatcatccgccacatatctttttataacaaaaactttatggcttatcggctacatttggtacgaagccccggaggaagaaaagaattttacgacgctgcttgaaatgataaatgccagtgaagcccgcgaggacgacccggaatttcagtcccccgttgaccttatgtttgaacggttggaggaaaaagacccggaacactttgctgtccggcagtataagaaattcctgttatctgcgggaaagacaagaagctctatcctcatttcctgcggggcgcggcttgccccttttgacattaaagagctgcgcgaccttatggaaaccgacgaaatggaacttgataccatgaggaatacgggcgggacgctgctatcaatgacgggggcagatttaccgagcagggctatatctacaataaccgtaatacctttacagaatggtatgacgggcgcgacgtgccggaggaataccgggtaacgccgcagccgccagtacaggaaaaggaacaggcagaccttgacgcttccgcagctataccgaccaccgccacagagcagcccccggttctcccgattatcctatcttctgaaaagcccgctgacaagatgaaagagattaccgaccgactggaacaggggattttaggactgtatgaaagcgaccgttacgccgactatctgcgtactatgtcaaaattccatgattacagccttaacaatacaatccttatcgccatgcagggcggcaatcttgtgaaaggctataaacaatgggaaaaggaatttgaccgccatgtaaagccgggagaaaaagctatcaagatacttgcgccgtccccgtttaccgttaagaaacaggtggaaaaaatcgacccggacacccaaaagcctgttttcgataaggacgggaaacctgttaccgaggaaaaggaaatcaagatacccgcctttcgtgtggtatctgtctttgatatttcacagaccgagggaaaggagcttcctgcccttacctatgagctgacgggcaacgtggaacaatacaaggattttttcgctgcccttgaaaagacttctccctttgctatgggatttgaagcactaagcggcggcgtaaaaggacgctgcaattatgaggaaaagcgtatcatcatcaacgagggcatggacgaattgcagaatatcaagaccgcaatccatgaaatcgcccacgccacgctgcatgatactgcccttgctatgccggaacgccccgaccgccgtacccgcgaggtacaggcggaaagcgtcgcctatgctgtctgccaacattacgggcttgatacgtcggactattcttttggatatatcgccgggtggagcagcggaaaagaacttgcagaactgaaaggctctcttgaaacaatccgcagcaccgccgcaaatctgattgataccatagacggacattttgcagcaatccaaaaggcacaggataaggaacagaccaccgaacaggcgcagcccgcacaggaagctaccaaacagcccgaagcagaagccgccacgccggagcttcccgaagaaacagccccggtacaggaaaaagaaacacagccggaacaggctgcacccgccgccccttattatcctatcaatgaagctgccgccaaacgtgcaaaggatatgaacagcttttccgattataagcaaggcagcgcgacggctgaatacaggcattatgtagatgaagccgtacaaatcgcagaaaggcaaaaacagcgggtagacccgatgtaccatgagaaaatcgacagcctgcttgacacctatgcccggaaactggcggcgaacatgaataaaggctatgagattgacgcgcgtgttccctctatcctgattgcgggcggctctaacttccccacaaggaagaaagaaaagcagaacgcagcccgcgacagcaattaccgggaatggcaggacatacaagggcttcttgataaaatccgcagtaccggcatgggcggtatcagcgcagacgacccgcaggcagtacagaagttagaaaagaaactggaaagccttgaaaaatcacaggaaaccatgaaagccgtaaacgcctattaccgtaagcataagacccttgacggctgcccgcatttaccgccggaggaactggaaaaactgaaagcagacatggcgagcagttggcatttggaggacaagccctttgcgacttgggcgttatccaacaacagtgcagaaatccggcgcgtgaaagaccgtatcaaatctctttcacagcaaaaagaaatcggttttgtgggttggaaatttgacggcggcaaggtggaagcaaacaccgaagcgaaccgactgcaaatcttctttgaggataagccggacgaagccacgcgggaagccctaaaaagtaatggcttccgttggtcgcccaaagcaggggcatggcagcggcagcttaccagtaacgcctattatgcggctgattatgtcaaggcgattgtaccccttacgggggaaaagcctaccgagttacaacgggcgcatatccgggcgcaaaaggtagatgcacaggagcagccggaacaggaagccccacaggacaaagacaccttttccatttatcagataaaaggcggggacgaaacaagagatttgcgctttgaaccttacgaccgtctgactgccacaggacaccgggtagacgcgaaaaactatacacttgtctattccgcagagcttacgccggggacttcccttgaagatatttacacccgctttaatatcgaccacccgaaagattttaagggacacagcctttccgtttccgacgtggtggtgcttcatcagaacgggcaggacaccgcccactatgtagacagcttcggttataaggaagtgccggagtttttcaaggagcaggaaaatgccctcattcccgccgacttggaaacgggcgaaacaatcaaaacaccgagagggactttctatgtaaccgccatgagccgcgagcaaatggaagctgccggatatggattgcaccaccagtccgacgacggaaaatatctgattatggggaacggcactagggcttttgctgttcccgttcagccagagaactatctgaaagctgccgagcagaccacagagcaaaactacaacatgattgacgggcagataaacaacaccccgactaccgcagaactggaagcaaaggtaaaggcaggagaaaccatttcccttgttgaccttgcggaagctgtcaaggctgacaaggaacgcggcaaggcagcaaaaacggaaaagaagccctctatccgggcgcagcttagagcagacaaagaaaaaaccgcacagaaaaaagcggcaaaatcaaaaaatcacgaattggaggtatgagcatgattagactgaccgttgaagaaacaaacctgttgagcatttacaatgagggcggtaagcgcgggcttatggagaacatcaacgctgcgctgccgtttatggacgaggatatgcgggaactggcgaagcgcacccttgcgaaaattgcacctctgacagaaaatgagtatacggagcttgccattttcgccgctgatgaggtatgaccgggctaaagcggcttacgccgccccaaagccggaaagtcaacagccttgtaaaaaaggagtgctgcaactgcgataacggacactgtattttactggacgacggggaggaatgtgtctgcccgcagcttatttcctattctcttctatgcaaatggtttcagaccgccgtacttccctttgataagctgctgtatgcagagcttttcaagaccgaggataaaaagcgttgtaccgagtgcggagcttcttttgcgtccacctctaacagcgtcaaatactgcccggactgccggaagcgtattacccgcagacaggcagcggagcgcatgaggaaacgacgcgcccttgttacgcagtaggggcaaaaaaagccttgatttacagggctttccgggtgtgaaaatgacgcggcaagggttttataccttttccctcaaaaatggcgttctactgcgtaacattttatcgctgtacccataagaaagccggggcgcggatagtctttaccgactgtctgcgtcccggcttttaaaacttcaaaaccactttgttttttcatctctgaattgtggcatatcattttgggcgtatggattataggtattgagattacaaccaaattctttcaactccattattttgttattttccgtccatactattaaagaaattccgtcaaattcttcaatattaccattattcattttgtttttgaaataccattctacaatagtttgattttccttatgaaaaaattgtttaatatcccacactaagacttttccacgagtattccattcatcaaaccaatgttttactgtttttcgactttcatacttaggactccaactttcagtgtaaatcacatcttctgtaaaaatactatcaatccctaaatcttgttgttttagccacatatcaaaccataaatgaataattctttctctttcattcataacttttaaatcctttctctatattgatttgaggggttgcactcttatctgcggtaagtaaacggtatatcgtaagggggatataccacgtagcaacgacaagccgccatattaaaatgcccccgccgataatgccgtccaaaatgaagttaatggcaacgatacccaccgttccagctatgtcatatccatgcggtacaagccatacgaacatacggcgaatgccaaaggggataccgcagcacagccatacataaaagtaattggtctacccgtcctctgtaaagatgttcttgaacatgaagaataaaaacaatgcaataacggcgggcaaaacgtttctcttgaaaaagtctttccaaatttctccgcgtgtcatggtatcactccttttccattggaaattgtgggatagcttctaacagtttcattatgagtgtttgccgtaaatcttcgtcgatttcctctttgatagtcccgtccggctgacacttttttaccattgcaaggcggttgatttcgtcgccgtaacaatcaagcaccttttccaacgcccatttttcgcccacaacggcagcgcatatcgtttcatagtccggcatttcctgttccattttctgacacttcctttgctgaaaatgtatcactttagtatgtggctactgtctttgataggaactattatatcacacaagtatgaacaaaactactccccgcgttctttccctttttcccgttccggctctcttggctgccgtaaaatgctgtctatgttctgtttgataacgtcgtactctttgacctgttttttcagtttgccatagtccgcgtaaagggcttctttctgttcccggagcttttcatagtctacttgtagcgcggcgacattcgggagcttggaaacgcccgccgtttttagtgcctttgccgctgcttcatggagtatcagactgctttcctgctttgcccggtatgcgtccttatcctttgccctgcggtatgcttcatagacaggttttgtcttttggtaggtggtaacgtgcttcatcagcaccgccatgtttgcaagacgtttctccacgctctttaatgcgtctgctgtcttttcattttccgcatttacttcctcaatccggctgactaaatctgcgtactgctcaatcttatgttctgtcaagaaattcatagtctttgcagccagtttcagattatggattttcgcccactgttcatagccccggctctgcgctgccttgatactgttttcaatgtcaataagcagcgatacgccgcgctgctctttgggagctttcgccgcctttgtgcgcttgccctctaaattaacatcggaggtataacttatggaaaaggaaacaacaggaactgtaatttcagttacaaaacaatggtggttaaaagtaaatcgtaaacctgtccgtacccatgctatggatggtgcagcttttccacatattatcaaggtcaaatacacgataggcgtcaaagattacacctgccaaaaatggattggcgcaggaaacaaaattcctgacaagggaacaacgattaaagttatctattgtgaagataaaccatcaaaagcaagaattgaactctgattcaaatagcttgatatggtaggttttattcggtgtggagtaacaagttttggtaatttggattcctcactactgaaaaaatagtgtcttttatgcacacttcctaattctacgctacgacagcaaaagaaaaaaagccgtcgtagcgcagacatattttcacgcgcatttgaagcggtggctttaatttttagagccgccgcttctttttgtctactgctaacataaattagcggcatttaggagggctgccgctatggggatttctttgttgctatacagcatacataggttacattcattaaaaaaagtatagctcccccaccggacaagtccgactatacagatgaactatcaaatcaattaaatactgctgttatttcctatgcgtcggtctgcgccttgcagatgggcgcattttgcattttacagaagatttttcaaagaaattttcgctttcgtccggcgtttaaaaaagtcgtctgtattatcccgcgaaaaggggaggtactaccgcctttcggcagaaaggaggtgattacatggaacctaatcgcagagaatttcagaagcaatgtgtctttcaaagtttctgtaaacgggtgctacacaacgaagcctgtaacgcccatgatgaaatccggcgacgcaggaaacgggaagtttctttttgtgaccttgccttgcatgaggaacggcagctttacactacggataaatattttcaagctgaaacagccgagccgacttatcaaatggcaggaaaagaaataaccccgaagttattgcttgaagcaatacgcaccctgccggaagaaaagagaactgctatacttctgtactatttcgagggcatgactgacgtggaaatcggaaaaatgttcaatacgtcgcgcagcacgatacagtacagacggacaagctcttttgaactgttaaagaaatatttggaggaacacgctgatgaatggaacgaatggtaatcaaaacgactacccggaaaatgcccttgttccctatcccgttattttggcggcgagcaaaggcgacccggacgctatgaaaatggtcttgcagcatttcagcggctacatagcaagtctttccatgcggaagctctacgacgagcgcggcaatgtctattatggcgttgacgaggatattcgggaacggctgcaagcaagactgatgagggctatcctcacttttcgggctgaataacctacgcgatattggaacgcttctttccccttttccgttccataccgcaagacagccccctgctctttgataaagaaagcggcgcaatagaacggcgacgcagcataaggcaaatcggatacgttccttttgtgccgagccatgcggcgggtacgccatgacctttctcttaacagaaaagcgagcgagaaataccacaccgtaaagcagggatagcagcctgcgggcgataacgcacagaatacataatgatacttccttacagccatagtccgagcgttagaagcgtcgcaggcaatgggtagggcttcggcagaccgccggaggggtgcaagtcccatgaggttacgctaatagccgtccgattaaagcctatgttacagattgatttttgacccattaagaaagggggacgacaaattgaacaataacgacgtgccgatttgggaaaagtacactcttaccatagaagaagcagcaaaatatttccgtatcggagaaagcaagctgcggaaactggcagaagaaaatcccgtcccggactgggtaatgatgaacggaaaccgtattcagattaagcgtaagcagtttgaaaaaatgattgatacggtggacgcaatctaatagtgaaatcgagccttgaatgtggtacaatgtagtcaagcatatcaaggctctttccattatggaaaggagcataacgatgtcggaaaaaagacgggataataaaaatcgtattctccgcaccggagagagccagagaaaagacgggagatatgcctacaaatatatagatacctttgggaaaccgcagtttgtttattcttggaagttagtgcctacggacaaaaccccggcaggaaagcgcgacgatatagcgttgagggaaaaagagaaagaaatccaaaaagaccttgacgacggtatcgaccatatcggaaagaaaatgacggtctgccaactctacgcaaagcagatacgccaccgggcaaatgtgcggcatggtacaaagcaggggcgaaaacagctcatgcggattttgcaggaggataaacttggagcctgccggattgaaaatgtgaagctctccgacgcaaaggaatgggcgttacgcatgaaagaaaaaggttacggcttcaagactatcaacaaccacaagcgttccttaaaggctgccttttacacagccatacaggacgattgtattcgtaaaaatccatttgacttccagttgaacacagtccttgaagatgatacggaaccaaaggaacctctatcccctacgcaggaagcggcttttctgtcctttgtacagcatgataaagtctatcagaaatactacgacgagattatcatactgttagggacagggcttcgcatttcggaactctgcggactgacggaagctgacattgacttagacaaacagcttatcaatgtagaccaccaacttttgaagattgcagatgtgggctactatgtggaaacgcctaagacgaaaagcggcaaccgggttattcctatgagtgaaaaagtgttggaagcatttcaacgggtgctaaataaacggaaatatgcacagcctgttattttagagggctacacaaagtttctgttccttaaccggaacggcttgccaaaagtggcagtcaactatgaaagtatgttccgggggcttgtaaggaaatacaacaaaacgcaaaaggtcgcattgccaaaggtaatgacaccgcacaccttacgccacacattctgcaccacgttagcaaatgcgggaatgaaccctaaagcattgcaatacatcatgggacattccaacatcaatatgacgctgaactattacgcacacacaacttccgaaacgtcaataaccgaaatgaagcggctgattgcatagtagtaaatggagaatttactactccacatactacttttgaacacaaaaacatacggggatataagaagatttgagagtatcttccacaatgaaaaatgccggaaaagcctgtaacaataggctataccggcatataagaacttttgaaaagatagtcaaaaattactttgtgatttatgataaatcaactcaaaaatcccatcgtcattgtttctgtgacaacccttgtacttcttctaaatgtgggcggatggtctacatctacccggaaaaggatcttcgtgcttatcccggaacgatccgcggcaccgaaaaatgggatgatacctataaaatcaggactgttgtcgaaagagatatcaaccacatcaaagacaatctctgtcttgcaggacgccgaacccaaaatgagaggactctgcatgctgatctgattcttgccgggatcacacaacttattactgttgttctcgcagataagatcaatcaccacgaatatattcgaagcataaaaccactcatagcttaggacttaccactttcataaagtccatagcttattaaagtgcgcctaacatgtgcgattatccatttttcattccacaagtcgtgctcttcgcgaattcttccttgttttggttcaaggttacgaacgagcaccgcgagtttcgcaattacctagtcttcattatataattctcccctattgcttgcaacagaaaagaagcctgattttgctgtgacataaaaggctccggaaacctgccaatttctcacacagatccccggagccttccattcaatattcagttgtgataataaaatttcctatcagaactctggttcgatcagtccgtaagtatttcctttacgtttataaactacgttaacctgctctgtctcagcattaaagaatacaaagaaattatgtccgagaagctccatctgtacgcatgcatcttccggatacattggtttgatcccgaatttcttggtacggatgatcttaacttcctcatcctcttcataatccttatcaaggtatgccttctggaagtttgtggattcctgctgcttgtcaacgatcttgttcttgtatttacgaagctgacgctcaattacctcttcaaccagatcgatggatacatacatatcattgcttacctgctcggaacggataatgttacctttcacagggatcgttacctcgatcttctggcgatccttctcaacgcttaaggttactgaaatctcagtttcaggagtgaaatacctttcaagtttaccaagcttgtcctcaacagctgttttaagtccttcggttactgctatattctttccactaataataaatttcatgacttccatcccctttgctgttttatgttgctattataacatattaaattgaattttaacatcacttttcaaaaatttcataaattttttccaaatttattcgatatattccttcaaaatgttttttttgtcgtgaatgcgcaactattagagtatttcatctaattaattcattacaaatgtatatctgcacaccagtgccagaagattgatgggacaaaagcatctgcttcactatttgtatatactatttcattttagccagagcttcaaagggtatacttccgccaaaaatatccaaagcactgccaacagtcacatccagtctgccctgacctgcttttcgaagctcttcaatatctgccatagaacccacaccgcctgcataggtcaccggatgggctgtatactgtcccagaagctttgcaagctctgtttccacacctcgggcctttccttccacatccactgcatggaccagaaattcgtcgcagaagcttccaagcctttccatcagctccggtgtcacgatctcttctgtaaatttctgccatcggtctgtgacaatataatatttgccatcttttttgcggcagctcaggtcaagtacaagatgttctttccctgcagcatcacggatcttctccagattttcccaggagatcactccgtttttaaacacataggaggttacgatcacgtggctggcgccagcctccagatattctgtcgcattctccgggcagatgccgcctccgatctgaagccctccgggatattttcccagagcctgaagtgcctgggctttcgttgcttcatagttcggggaatcctttccgttcagaaggatcacatgaccgccctttaatcctgccttcttataaagctctgcatagaatgccgcatcctgctctgacacaaaattttctgccgcctgatccccctgatccttcaggcttcctcctacgatctgttttacctttccgttatgtatatcaatgcatggtctgaatttcataatcctgtcctccattttctttccatgcactgataatagcatctgaaacagttttatgcaatgctgtggtaaaatatctgttatcttccttctaccgcatttcccactgcgtttccgatatcatccactgcattacctacgccgtcgccaaggtcctttacactgtcacccagctcaccggatacagttccgtcattttcgtttctgtcagcatccgcagctccgggtgctgctgtcccgttatttccatttcctgcaggcgtcacggtaatatttccatcggacatctcattgttatccgtgccggaatccttaatgctctctccattgtccttcacaccgtcattgtctgctttttcttccatagtttcatcttctgcggcagtattttcgtttgtatctttttccttatccttcgtgtttttatctttttcatccactgtttcatccgcattgtttacctctgtgccgcaggctgtaaatgtacacagagacagggtaagcaaagtaccaaaaagaatcgccttccattttttcatatgatcttctcctttttctaaaaaattctgtattcctaatatggcactttttccgctatcctattctgggaaaaatttcaaaaaccgcaatttcatcaaaaaaagacggggtccgatcttacacgaaccccgtctgtattacctgtaattttattctgttgcggctcaatctgtcagaatcagccgatcacgtcactcatatcataacgtcctgccggtttgcctgcaaggaatttggctgcttctacagcaccttttccaaaaatagccttggaatatgcagtatgcttgaactcgatcacttcgtcctgacctgcaaaaattatctcatgctcacctacgatagttccgccgcgaactgcggagataccgatctccttatcatcgcgtttttcacgtttctggctgcgatcatatacataatgatactggttatccatagcttcattaatgctgtctgccagcgcaagtgcagtaccgcttggtgcgtctaatttcaggcggtgatgcttctctacgatctccatatcaaagcctgcagctgcaagaaccctggctgcgtcctgaaccagcttcagaagtgtgttgataccaagagacatgtttgcggatttcagcactgctacctttcgggatgtttcttccacttttgcaagctgctcctggcttaaaccggtactgcacagaacaaccgggatctggcgtgccgcgctgtactcaagaagcttgtctgttgcctttgcggaagaaaaatcaatgatcgcatctgcctctacctgacatgcgtcaatatcggtaaataccggatagctgttttttccctgatctgcaatatcaatacctgctacgatctcagcatccggatctttctccacaatgccgctgatgacctggcccatatgtccgttgcagccatgcatgatgatttttaccatagtatattctcctttacctttcgcttacagtcagatcacttagcaagcttaaggccgaatttctcgatctcttttgcaagagctgcctttgtgtcctcttccatctcgcagagcggcatacgaagcggccctacgttcattcccataagattcatagctgtcttaacaggaatcggatttacttcgctgaacagcgcattgatcagcggaagagctttcagctgatcctctgttgctcccttggtgtcgccgtcgaaatatttcataaccatgtcatgtgtaaacttcggtgcaacgttggaaagtacggaaataactccaagtccgccaagagaaagaatcggaagtacctgatcatcatttccggaataaagctcaagctgtccgtctgccagagacatcatcttggcgatctgggaaagatctcctgttgcttccttgattccgacaatgttctttacattctttgcaaggtaagctgctgtagccggctggatgttgcagcctgtacggctcggtacgttgtacatgatgagcggagtttccggaactgcattggcaattgctgtgtagtgagcgataagacccttctgtgtagccttgttatagtaaggtgttacaataagaagagcgtctgcgccataggaagctgcttccttggacatcatgatcgctgtctctgtacaattggaacctgttcctgcgataacaggcacacgtttgttaactttatcaattgtgaacttaattgtctgaagatgctctccgtgtgtcagagtagaagattctcctgttgttccacagataacgatggcgtctgtgctgttcgcgatctgatcctcaaggatttcctcaagtttctcaaaattcaccttaccgtcttcatgcataggtgttacgattgcaacgcctgttcctttaaaaattgccatttgtcttcctccttctttcttctgtgaaatattgcttattcccgttcctggtcagtcagctctgttgttatcgtggtaatactatccacatagggcttcaaagcatccggaagccagcgtccggtcataattatatgcatactttcatccttctgcttaagcatatcgatgatcgtctcaactggagcgattcctttatccataagcccgaggatctcatccagcagcagaaaatcacactctctggtagcaattaccttccgtgcgaaattaaggccattgagaatattggttctctcttctgccttttcctgctcactcaggtcattatagcaggtgtccattttttcgaaacggaaaatcttgaaatcaaaattatccagttcctcaaggaaatccaattctctgcgttccctgcccttgaggaactgtatgatgatcacactttttccctgtgtagcaaagcgcagcccccggcctacagccagagttgtctttcctttcccgttcccgcaataaacctctgttatttctctttccatgatttttcctcttactgttagtgaaaccggtaattccccatttttctaatttttttaatattaccgcagattggctggaaatgcaagtgttaccttaatgttctcaccactattccaaaatatatccaatgttactcaacatattccaatttactcaccgaaacttcataggcaatccttttttctgtttcgttttcactaatccgtttcatgtactccctgctctggatcctgccccagatcagtacatgcccgcctacttcaaaagcagaagcatatctggcatttcttccccagcatatacatggtatgtaatcggattttccgtaaggtcgattaactgccatcagaagatctgcgatctctcttcccaacggtgtttttctgtatacaggcggtttacagatatatccgtccagaaagatctgattgaccggcacagtttcttcttcctcccccacaaacttcacttcccgggcaaagactgaaagcacaagccggtttctcttttcttcatgacggttataggatcggaactgtccgtggatctcgatatattctcccacataatcctgtgtgatatcgatcagccgctcagacaccatcaccgggatcctgtcctccgaatcgctgagacgttttaccaggatatccatcatgtaaaatccttctccaaagacctgatggctgaaagtaaaccccgtagcgatccgtcccataacggatacctgattgttttcaataattttatctgccataataagtagctctccttcctcttcgtgtatttcgtctatatcaatctatgtgtatttgcggtataatatgcctaaaaaatgaaaaaccaaaaatatttttttatgtcttgtaatctcacaaaaatgtgatagactataaatttggacatcatttttaacaaaaaagattacttatatatggaaagaaaggatttggattatatgaagaccaagcgtgaagatgttcgtaacgtggccattatcgcccatgtcgatcacggtaaaacaacacttgttgacgagcttttgaaacagagcggtgttttccgtgagaaccaggaagtccaggaacgtgtcatggactccaacgatattgagcgtgagcgcggcattacgattctctccaaaaacaccgcagttcattataaggatgtaaaaatcaacatcatcgatactccaggtcatgcggacttcggcggcgaggtagagcgtgtgctgaagatggtagacggcgttattcttcttgtggacgccttcgagggtgccatgcctcagactaaatttgtacttcgtaaagctctcgaactgaacctgcatgttattgtctgcatcaataagatcgaccgtccggaagcacgtccggaggaggttgttgacgaagttctggaacttctcatggatctggacgcatctgacgagcagctggactgcccgttcctgtatgcctccgcaaaagccggctatgcagttcgtaaccttgaggacaagcctgagaatatggctccgctttttgagaccatccttgatgcaattcctgctccggagggagatccggacggagatacacaggttcttatcagcaccatcgactacaatgaatatgtaggccgtatcggtgtcggtaaagttgagcgcggaaccatttccgtgaaccaggagctgatgcttctgaaccatcatgacccggacaaacacgagcgcgtaaagatcagcaagctctacgaatttgacggcctgaacaaggttgaagtcaagagtgctaccatcggagccatcgttgcgatctccggtattgcagatatccacattggagatacactctgtgcaggagataacccggagtccattccgttccagaagatttccgagcctaccatctccatgaacttccttgtaaacgacagcccgcttgcaggacaggaaggtaaatttatcacttcccgtcaccttcgtgaccgcctctaccgtgagctgaatacagacgtcagccttcgtgtggaagacacagatacaactgagtgcttcaaggtttccggccgtggtgagcttcacctttccgttcttattgagaacatgcgccgtgaaggatatgaatttgcagtcagcaaaccggaggttctctatcatacagacgagcgcggacgcaaactggagccgatcgagatcgcatatgttgatgttccggaggaattttccggtaccatcatccagaaactcagcgagcgtaaaggtgaacttcagggtatgagcacagcaagcgacggaactgtacgtcttgagttctccatcccttcccgtggactgatcggattccgtaacgaattccttacctccaccaagggtaccggtatcctgaacaccatgtttgacggatatgcaccatacaagggagacttcccgtatcgtaaacagggttccctcatcgctttcgaggcaggcgagactgtaacttacggtcttttctccgctcaggagcgtggtactctcttcgtcggacctggcgagaaggtttacagcggtatggttatcggacagaatggtaaggctgaggatatcgagctgaatgtctgcaagaccaagcacctcaccaacacccgttcttcttcggcagacgatgcgctgaagcttgttccgcctaaggtattaagccttgagcaggcaatcgagttcatcgaccaggatgagcttcttgaggtaactcctaagagccttcgtatccgtaaacgtatcctggattccagagatcgaaaacgtgctgcattccgcaagagctgatagaattttgacgattatttattgtttactggattctggcagtgttttgcagttataaaggattcggatatatctttaacacgatttacacaactgtcatacgggaatcatttcctgtatggcagtttttttctggaatcatttcctgcatgaccgtttctttctgcaggaagaatccaggctgcaggattctctgcctgtggcgaatttccctgaacaacatcgggctttcctgctcgcaggattctggcagttatctcctgccctgtttttcattttcagacaaatctatccatttctttctgcattcctgaaaaaattctccatatattttgcttaattgttctgaaaactcaaataatttcaagtttttttgtcaattatggtttgacgctttaccgtgacatgatatttttgtgaattatttatcaaaattcttcgttattttcgttaattatttatcacattcgctattgacgtctggaatctgttaaattataatgtgttcatgattgattgacaaaagtttaacgttaatgttttaactgcatgatacgttttgtcttttgccagcccctcatatgtgtgcatgttttttgtcagtgctgacaaatatttaacatgttttttgtgcacagtgctgaatttaaagattttttttaaaggatttttcaataattcagcgttctgcggagtgaaatttacagtattttcccctgattttctgttcgtcattttgcacatagctgcaaaattcagaatttgcgtttttttctgaattttgatactatataatcatcgaaacagaaaattcaatcagattgaatcaaccaagcaacgcagcgcggggacttacaaaaactctgcagcatctgccggcataaaaaacaggcccgcagaaccacagatcattatcatatgaaaacaggaggattccacatggcaaagaaagaaactatccctaccatcatcgacactccagaagccctgaccgcgaaaatggctgcaatgaaagaagcacagaagatcttcgctacctacacacaggagcaggttgacaagatctttaaggcagctgctactgccgccgacaaaatgcgtatcccacttgccaaaatgaccgttgaagaaacaggcatgggtatcatggaagataaggttatcaagaaccattacgcagcagagtatgtttataatgcatacaagaacacacagacatgtggtgttgtagaagaagacaaggcatacggaatcaagaagatcctggagcctgtaggactggttgccgcagttatcccgactaccaacccgacttccacagcaatctttaaatctcttatttctctgaaaacacgtaacgcaatcatcatcagcccgcatccgcgtgccaagaagtctaccattgaagcagcgaaagttgttctggatgcagctgttgccgctggtgcaccggaaggaatcatcggatggatcgatatcccgagccttgagctgaccaacatggttatgcagaacgccgatatcatccttgcaaccggtggtcctggaatggttaaggcagcttactcctccggtaaacctgctgttggtgttggacctggaaatacacctgccatcattgatgacagtgcagatatccgtcttgcagttaactccattatccactccaagacatttgacaatggtatgatctgtgcttccgaacagtccgtaactgttctggagagcatttataaagaagtaaaagaagagttcctttacagaggatgctacttccttaaaaaagacgagatcgagaaagtcagaaagacaatcctcatcaacggcgctctgaatgccaagatcgtaggccagaaggcagctaccatcgccgagatggcaggcgttaccgtaccggctgagaccaagatccttatcggtgaggttgagtccgttgatatcagcgaggaattcgcacacgagaaactttcccctgtacttgccatgtacaaggctaagaattttgacgatgctatcgcaaaagctgagcgtcttgttgctgacggcggctacggccatacatcttccctctacatcaacgtgaatgagacagagaagatggataaattcgaggcagctatgaagacctgccgtatccttatcaatacgccttcttctcagggtggtatcggtgacctttacaacttcaaacttgctccatccctcactcttggctgcggttcctggggcggtaactccgtatccgagaacgttggtgtcaagcaccttctgaatatcaagaccgttgctgaaaggagagagaatatgctctggatgagaacaccggaaaaggtttactttaagaaaggctgtatgccggttgctcttgacgagctcggtactgttatgggcaagaaacgctgcttcatcgtaacagactccttcctctacaagaacggttacaccaaaccgatcgaagataaactggatcagatgggcatcgttcatacatgcttctctgatgtagcaccagatccatctctcgcttccgcaaaagccggagccaaggctatgacagcatttgagcctgactgcatcatcgctcttggtggtggttccgcaatggatgccggcaaggttatgtggatgctttatgagaatccggacgctgacttctccgatatgtccatggacttcctggatatccgtaagagagtttacaccttcccgaagatgggtaaaaaagcttacttcgtagcaatcccgacatcttccggtacaggttccgaggttacacctttcgccatcatcacagatcaggataccggcgttaaatggccgctggctgactatgagcttcttccggatatggcgatcgtagataccaacaacatgatgagcgcaccgaagggactgacccgtgcttccggtatcgacgttatgacacatgcaatcgaggcttatgtttccatgatggcttccgattacacagacggtcttgcactgaaagcgatcaaactggtatttgagtatctgccacgtgcatataaagacggcaacgatgtagaggcaagagaccatatggctaacgcttcctgcatggcaggtcttgcattcgccaatgcattcctcggtgttaaccactctctcgctcacaaacttggtgctttccatcacctgccacacggtatcgcaaacgcagttgttcttctggatgttatgcgttacaacagtgctgaggttccgaccaagatgggtaccttcccacagtaccagtatccaaagacacttgcccgctatgctgagatcggccgttctgtaggtcttacaggcaagaacgatgcagaagtattcgaaaaacttctcgccaaactggatgacctgatgagaacaatcgagatcatgcctacaatccgtgactacggcgtagatgagaaatacttcctggagactctggatgagatgtccgagcaggccttcaatgaccagtgcaccggcgctaacccgagatatccacttgtatccgagctgaaagatatctatctgaaggcatactacggagaaatgccaaagaaagaagagaaaaaagccaaataaatgtggaacacccttctaagggaaacacggccgggagtttattcgctcccggctgcgtttcctttgcttatttccctcttgcaaaagatccccgatacagttctgtatgaacaggctgtaccggggatctcttatataatcgctttataattatcgtttattctcgttaatttatttcaagccatactctgctgcaagtttcttaaactccggaagagaatttacaatggtatcataagatacacagtatgccagtctcacataaccagggcatgcgaaggagcttcccggtaccatgaggatgttatatttcttgccggcctcgcagaaggctttttcatcagctaccggagattttacgaagagatagaacgcaccctgtggtttgatgcactcaaagccgcattctttcaggccattgtaaagtgcctgacggtttttatcgtaagctgcaagatctgtctttgcatctacacatttcgcaactactttctggatcagggatggtgcatttacgcagccaagtgtacggtttgcgatggttgcagctgagatcagttcttcacttccgtccgcctcatccgggatcaccagatatccgatacgctctcccggaagggaaagagatttgctgtaagaatatcccacaactgtattgtcataatatttcgtcaggtacggaacttccacgccatcgtaagccagttcacggtatggctcatcggagatcaggtagatcacggttccgaactctttttgttttgcttccaaaattgcggaaagtttcctgattgtttcttctgaatatacaactccggtcggattgtgcggagtatttacgataactgcttttgtcttcggtgtgatcttctgctcaaattcagcgagatttggctggaaggttgtggtatccggagagatttccacaaggacaccgtcataattgcggacatatgcaccgtattccagaaaatatggtgcaaaaacgatcacctcttctcccgggttcaggatcgtcttcagaattacgttcaggccgcttgcagcgcctactgtcatgatcaggttctttgcagaaaattttgtatcaaaacgtctgtttaaagattctgcgatagtctggcgtacatcttcaaaacctgcgttgctcatatatccgtgaaggacggtcgggtccgtattatttacaagatcgataatggcttcacgaacactgtccggcgccggtacacttggatttccaaggctgaaatcaaaaaccttatctgcgccgtattttgcacggaggcggtttccttcctcaaacatcatacggatggcagaattgttttttacgtagggtttcattttttctgatatcatttcgtgttctctccttttattctgagcaggcttgctcctcctgatacaagcaagtccccacccattgcttattgcttttcacaaccccacagggctcttccctgatctggtttaatttctacatcatcattttcaccgtttcctgacaatcttgtttataattgtaccccgtttccgtctggcgtgtcaatactttatcaaattaaagtgtatataaaaaaatccctgggaaagtgacacacattcccagggaacttcctttatttggttaaacccacattatatacttctatttctcaacatctgttatcaaacttattgatttcccagcttcgtcctcacaccccacacagccagcgagcttcccaccagcgcaacaacgaacccggtcaggacatctgttggataatggacaccaagatacaatctggaaaatgccaccagcgctgccaggactactgccgggattccaattttcttcgggagcatccgaagcattaccagggcaacggcaaaggatgctgttgtgtggcctgacggaaaggagaaatccgttggtttggcgatcagcgggatcagagcttcgatttccgcaaaaggccttggccttgctactatgtttttgagaagcagattcgtaacgatcactccgaaaatcagggacaaaactgccgcatagcctgtttttcttgtctttggaacagcaagaagaacaactgcacagaggatccagaaccatcctccgtttcccagaaatgtaacgattttcataaatggtgtcagcatatccgttcttaaatgctgctggatctggagaaggatttctccgtccagattctgtactgactgtaaaaaagtattcatatgtattcccttctctttctgctgcgacaggtagataaaatacccgggcttgtcttccgccgcacattctttactgttgatcattataccgtacatctcttgattttctgaaaacgaaaactaaatattttataaacaaaacgcccctgcactgttcaaaccatcgcacagcacagaggcgtctccttcccgttactcaaaactttctatatcaacttttctttttctttgcaggatgcctgcgctttgtattttatgctttacgctccgcgctctgcctcccgctccttgtaatgatgtgcctcctccagcatcatatctttcaccttcatcagccggatctgggtacttctctcgttctcgtccagcttcatggtgatgtatttgatgtttgcctgtgcttccggtatgatgacatgctccagggcgtttacacgacgccttgttttttcgatctcagaagccatcagctgacaggctttttccacttctgccagtcggagcatatccggcaggatatctgccagagattttaccgctccgtccagatcactggaggtaaaagcaaaaccataggaatagatatcgttggcatccggggttcttgttttgtattcaaaaacaggaatatccacactcatgacattctttttgccggtttccagatagacttcctgcttgggagccatcagggcagtgttcagagtctcctccgacattccggcttttgcaatgacaaaattggtgttggcacttcggataccagcctctacttttttacgcagctccatgttctcgcgcaccagatccaggaactgtcgcatcagctcgtcccgcttatccttcagaagcttatggccacggactgcagtcaccagcttctttttctgcttcgtaagctccatacgggtaggattcacctgtgttgatgccacaaatcatcccccctttatacttttccgtaatactggtcaaggaatttgtcatcgatacgtttcagctcgcttctcggaagaatggaaagcagcttccagccgatggccagggtttcctcgatatcacggtttgcctgatagccctgggaaacatattccttctcaaaagcatccgcaaatttcgcatagatcaggtcaatgtcagagagggcagcctcaccaagaatggtcatcagctctttggcctctttaccacgggcatatgcggcaaacagctggttcatggtgttggcatggtctgctcttgtcttaccctcaccgatacctttatctttcagtcgtgacagagacggaagaacatcaatgggcggtgtgattcctttacggtaaagctcacggctcagaatgatctgtccctctgtgatgtaaccggtaaggtcagggatcggatgggtcttgtcatcctcaggcatggtcaggatcggaaccatggtgatacttcctgcttttcctttctgacggcctgcacgctcgtagagagaagcaaggtctgtatacatgtatccgggatatccacgacggcccggaacctctttacgtgctgcagaaacctcacggagagcatccgcatagtttgtgatatctgtaaggattacaagaacgtgcatgtctttttcgaaggcaagatactctgctgctgtcagtgccattcgcggagtagcgatacgctcaacagccgggtcatttgccaggtttacaaaaagaacagtacggtctatagccccagtttccttaaagctctctacgaagaagtttgactcctcaaaagtgatacccatggcagcaaatacaacggcgaactgctcgtcttttccgcgaaccttcgcctgtctcgcgatctgtgccgcaagctgtgcatgaggaagaccggatgcggagaagatcggaagtttctgcccacgtaccagggtgttcagtccgtcaatagcggatacaccggtctggataaactcctccggataacttctggctgccggattcatcggcaggccattgatatctcttctctcttccggaaggatctccggaccgtcatcaatgggacggcccagtccgtcaaagacacggcccagcatatcgccggatacaccaagctccatgcttcgtcccagaaaacgtactttactgttggaaaggttgatacctgtggaactctcaaacaactgtaccagcgcattgcttccgtcaatctccagaacacggcatcttcttgtttcgccatcggcaagctcaatctcacccagctcgtcaaatgccacatcttcaacgcctcgtaccagcatcaaagggccggcaacttcctgtatggtcctatattcttttggcattttacaggccctcctttcccagaagttccgcagtctctgctgcaagctggtgggttaccttctcatattccgctgccagctgatcttcttttgtatatttgtaacggccgatctgctcacgtaccggcagttttacgatatcattgatatctgcaccctgtttcagcgcatccaggcctgcatcatagaatgcaagtaccaggcgcatcatgttgtgctgtttttccagagatgtataggtatcgatctcatggaaagagttctgatgaaggaagtcctcgcggatggaacgggctgcttccattttcaggcggtcgcccggagaaagtgcatccatacctaccatctttacgatctcttccaactctgcctcttcctggagaagggtcatcattctctgacggagctccatccagtccggcgccacattttcatcaaaccatccacctacactgtccagatacagggaataactggtcagccagttgattgccgggaagtgacgtttgtatgcaaggtttgcatccagtccccagaataccttcacgattcgaagtgttgcctgggaaacaggctcggaaatatcaccacctggaggagataccgcaccgatagctgtcagggcaccttctcttccgtcttttccattacagatcacgtgtccggcacgctcgtagaactgtgcaagacgggaacccagatacgccgggtaaccttcctcacctggcatctcctccagtcgtccggacatctcacggagagcctcggcccatctggaagtggaatctgccatcagtgctacagagtaacccatatcacggaaatactccgcaatggtgatacctgtgtaaatagaagcctcacgtgccgcaaccggcatatctgaggtgtttgcgatcagaacagttctctccatcagagactgtccggttttcgggtctttcaattccggaaactcgttcagaacgtctgtcatctcgtttccacgctcaccgcagccgatataaactacgatatctgcctctgcccattttgcaagctgatgctggataacggtcttgccgcttccgaacgggccaggaactgctgccacaccacccttggcgattgggaacatggtatcaataacacgctggcctgttaccagaggttttgccggcggaagttttttcttgtatggacggccacgtcgtaccggccagtgctgcatcagtgtcagttctttatctccgtctgccgtggaaagaactgcaacggtctcatctacggtaaactcaccggatctgatctctttcagagtacctttcatattgggtggtaccatgatcttctgtgtaacaacgatggtctcctgaacagttccgagaacatcgccgccttccagctcatctcccactttcgcaaccgggacgaaattccattttttgtcccgcttcagtgcaggtacctcaacacctcgtttcaggttgttgctgcctgctactttcataatgtcatccagcggacgctggattccatcgtaaatacttgtgataaggccaggtcccagttccacggaaaggggaacttccatagactctaccggttctcccgggcgaagtcctgaagtctcctcatatacctgtatggaagcctcatcttcatgcatctcaataatctcaccgatcagacgctggctgcttacacgaaccacgtcatacatattcgcatctcgcatacctttggcaattaccagcggtcctgctaccttcttaatggtccctctgctcatctgaaccaatcacctgctttctcaggggatctgctgaaactttttcaaaaaagtttcccccttcttattcatataaagcgttcaacatgcatcacggaatatttcctgatgaatatcattcattgctgaaaagaatatcggagccaactgccgtctccacagatttctttacattttcaattcctgcgcctgtatttccggcaattcccggtatctgaatgatcgccggcatcagcgtttcactgtatttactgatctcagcggaaagctgggctgccagctgttccgtaatataaataaccgcatattcaccggctgccagacggtttagcttctcttttccctctgcgggatcttccaccggaaaggtatcaaggccaagcgccgcaaacccgtaaatgctgttataatcacccaaaaccgcgatcttatacatacatttcccttgccctttcccggataaactcttccggaaggccgctgcgctttccggtgagaatgatccgcaccgtcttgatctcattctcacgggcgagcacataggctaccagcggtcccagtgaaaatgaattgtacagctgaggtcggatagtctccatgatctggttgtcacaccatctctcaaaagcggaagccgattccgccagtgccagagctccgtccccgtatttcgtttctgccagataactcatgatctgatccattccgctgactgcagcgtggatcagtctttccttatccagtgtgtcacattctgccatagcttttttcatgaagtccgaactttttcctgttttgcaggcacggactgcgatccggatatctgctaccgcaactgtagattccgcatactgccggacgatctcttctttcgatctctccccggccgctcttatggcatccagtgccgcccggtctacgataatatccgcaagctgtccatctcttgtgtgcaaaaaggtctcataggcttctcttgccgcttcccgcatatcttccggaaaacggtcgtattctttatccttcaggaatttcaccatatcctcgccgtcaatggcacagtcgctgaaaaaaatattcggcgttgtcccatccaggatgctggccttcacagccgctttcaggttatggaaaagatcctgataagagagaacggaaaaaacagatcggtccgctaccagcgaatccatgatctcccagatcttttctcgctccctggaaagaatggcgtccgcaccggctgcaggatcaccgtttccccagcccttctctgtaaggatctgaaggcactgctgctcatcctgacatgccagaagctgttcgatcgccgcctgattcagaagtccggtctccagaacacgtatccgcgccaccgcataggcataatcttcaccaaacatatttcacgccctcctttttgcgatggtgttttacgcaaacaaaatctttcttacctgatccagaagttcatcccgtttctctgcaaacatggcatcaatggaacagttttcctcaatgccgccgtataccaggataaaacctccgtctatatttctggcttcaccggaaatctccagtgtgccgccttttttctgtgccaggcctttaatctcctcacggaaattcgccggcatacgttccagatccttctttgaaaaacagatctctccttctcttggaagcagatatttctctgccatactcttaaggatctcaaaatattttccttcatccagattcttcacacggtcacaggcatccgcaatcaccttcccgatcagctcctgcttggctgcaagaactgcggtacgtttcttcatatctgcggcggaagctgtccgctcttcatagcttttcacctttgccctggactgttcttccctctgctgccgaatcttatcagctttttctccggcttccccgaggatctccgcggcttttttctccgcgtcactgatcataacggctgcagaagcatcggcttcttcaagaatctggcttaccatcttctctaatcctgtcatgatctgcccctcctgatgaatcaaacctgaattccgctgactgcaagaatagagatcagaagagccagaatcgcatatgtctcaaccattgccgggaaaagcatagctttaccgaactgctccggcttcttggctacgatgccgatggaagctacggaagtttttccctgatggatcgcggaaagaaggcctgcaatggcgatcgggagacatgccacaaagatcataagtccggtttccagagaaatatcggcaacaccgccgcccaggatcccgaccttggaaagtgcaaggaatgctaccagcagtccgtaaataccctgggtaccaggaagaagctgaagaagcagaaccttggcaaatttgtccggatcttctgttacaacacctgctgctgcacggccggctgtaccaacgccgatagcggaacctatacctgcaagagctacggaaattgctgctcccaataatgcccaaacgataccactcataatattaatcctccttaatatctacatattttgtattttcgcggaaggggtggaactcttttcctccgccctcaaagaatttgccgaagaactctacgtactgtaatcggcaggtgtgcacgtatgcacccagaagattgatcagaaggttaaatgtatgaccaatcacaaatacaagaataaatacgatccatccaaaaatactgtctcccagcatactgcccatctggttcataaccgacgcaataacaccggtggcaagtcccagggccagaagtctggaataggaaaggatatcactgacccatcctgtgatgttataaaggtcgtaagctccaagcgccagccggaggaacggattcttcttatctcttcctgacatgaagagaattcccactgctccgatgatggccatccatttgcccacctgtatcactgcgggcggaaggttcaagtccatctgagaaatagaacggaacatgctgctcgggataaagataaggatcagtcccataaggagcatgaaccagagtactacatcgcagaaaaagtcgagatattttctgtcacggatcagcatgtagcccttaagtcccattccaaggaacatatggatcaggccaaacagcatggagaacaccagaagtctcataggctcattcaacggtgcaaaccataccggcttcacagtgaccggtttatgcagatatactcttgagaatacatcgataaaatctccgaaatatccgccaaacattacgccccagaacaaagtggacagtccacagtacatgaacagccggatggatttctgcattccgctttccattctggggaatttcagaagcactcccagacagaccgcaaacacgatcagtccgtaggctgcatctgatagcatcagtccgaaaaggaatacatagcaggctgtcataatggtggacggatcgatctctccctttccgggaagaccaaacgctgccagaactccttctcctgccgctccgaatctgctgttctgaagggcaaccggaacattttctccatcagcatcttctgcttcaaaaacaatatcgtacttctccgtaagccgtttctccattgcgggaacctgtttcttcggaagatatcctgtcacaaaaaaagtgctctctgactggcggagctgacctaaaacttcatatttctgtgcacggatccggaagtaatcggatacaagctgaagggaattcttcctgtcatgaagatcacggatctgctcccggatctgttcggattcttcctggatgcgcaccacttcattcttaaggttctccagttcctgtgccggaacctctgataccagctgtgccggtcttgcgaatccctgcatgcggagtgcttcttccatctcctgtgcctgtgtcttcagacagacaaccaccaggctcagcttaccggcatcatttgagatttcctggatgtcaaaagcttcaagctgtggtgcgtccactgccagctgactgtatacctggtccagagttacattcccgtcaatacttcccacaagtactgccgttttcgctgttccctgcgaattcatggggatatccagatccagccatggagcaagtgccgcttcctgctgttcgatcttaacaactgctgcgctgttctctgtgagtttcttccggtacccctggatctctctggctgtcctcaggatctcttcctgatcccggatggcttcttcctcctgctttcttccgatcagaggctttcctgccagggatgccagcatagatcccttctccttcgaaaattcatccagaatctcgattgcctgatcgcacagggatgcgttcttttcgaagatcagtctggcattcatggtatccatggtcttaagttccgggtccagttccgccgcatcgatctccaatactccaagtgactgcagttcttccaatatggccttacggttctttttcattgcgcagatactgattcgctgcatctgcaatactgccattttcgcattccccctctcagaacaaactgtccattactgtctggatggcctgctcatgcctcgactccgctttctttttcaaagctgcaagctcctcctctgcctgtccaacgacagtgttctctgtactgtgtgcacgttcttcggctgctttcatatcagatgccgcctgttcacctgcggttatttccgcttttctgataatctcctccgcctctttctcagcttcgctgatgatgttctgtgcacggacggatgcgtcttttattttctgctgtgcttttgcctccgcctctttcactgccttgatcgtttcctggatcatctgatcaccgcctctctgcatatccaaattgtaccacaatcgctttttcgagacaatgtttattatgcaatttaacgagaaatttatttatattgtgtcaaaaaatcgtcacatatgttatatttttgccattttttcgcacactttttatttgtttattctattcatattttttatttttattcaaaaaagccatcagcccgatgaaaatgttttttacatcttcatcagactgatggctttcaattatgaacagacggtgaatgcggactaacctattcacccgacctacagtggctatctgttctatttgttaattgtacaggtaatttgcaatgtcttcgcttttgatattctcagcatcaatccatatcggatcaagtaaaaccttcttatcaatctttgtttccttcttcggtgcagtagactgaatagccgcccacatggtctgatatcccatcgcataaggattctgtgaaagcactcccagttcttcccctttctggatcgcttcctgctgtttgctggttgcatctacgcctaccatagcaactttattttctcctgtgtccttatttacctccagaaacatttcagaaacctcggcattggtgcagaaaacaccatccagtgccggatatttatccagaacttccttcatggcttccttcatatcatcaacctggtcagaatatacggtttccaccactttaatatccgtataatttgcaatattatccagaaatccctttacacgttcctgagcgctctgtgttttctcctgtgcggaaaaaacagccacatttcccatttttccaatggcgctgccaagcttatatgctgcatatttgccgatctgtgtattgtctgttccacggaaagctctgaccagcttcgtatcactgacattggaatcaaatgcgaccaccggaattccgttctctttcgctgcttccagctgtgcctgacaggaatccatatctccggcagaaagacacactacagatggattctcagcaatcactgcatcaagagtattgatctgactttctacgtcctcttcatcatccggaccctcaaaggtcatcgtgatctgcttgtcttttttgaaaccatacgcttcatttacgtccttgacagtagcttccattccttcttttactttattccagaactcgccttttttgcttttgctgacaacagctattctggcaccttcttcaatagaaagagtgtcatcgatctcagggatcagcgggcttttttcttcttccacttcggttgcttcaggggtttcctggacgtctgctacaatcggtgcaacaagcttttctacttcttctttctgacagcctgtcagcagggttgccacagccaacaaggctgctgacgctactgcagctcttttcattgtaatctcctcttcctcgctggttactgttctttatcgtctgccttgtccgtccacagtaacttatactttacaaaaatcttacatttggttacttgctttttacattatacactttttcgtatttccgtccagagtttttacacttttttcacaaaatccagaaacgcgcttccctgtggctctgtttcaaacttcatcatttttcctgttctggggtgtttaaattccagacaattggaacaaagtcccagtgatgtacctttttctcccgaaggattatatttccggtctccgagaaggggcagtccctcatgagaaagctgcacacggatctgatgatgccgacctgtttccagcctgatcttaagaagtgtccgggattttccgtttatctcctgctgatccagaactttatagtgaaggatcgctttttttgctcccggtgtattggcagacaccacctgagacatgttggcttttccattttttttcagatagtctgtaagagtcccttctgagctctttgcttttccctctgttactgccaggtaatattttccggcgcctcctgccatcatctgtttactcaaatttcctgctgcttcggatgttttcgcaaatacaagaatgccttctaccggctgatcaaggcgatgtactactcccagatatgggatctttcccgatgttttttgtgccagataatttttcagagcactttccatatccattgttcctatttttgctgcctgcaccggcattcctgctgtttttctgcacacaaggatctctttgtcttcatataaaatattttcttcaatctgataattccacatattttctcatcttacttcctttctcacagaagtataactgatgatgtttttgatggcaactgataaatataactgtccggaaaaatctctgattgaaaattttgctctctgctcggatcatattattttatccagggcttttcggaacggttgtatacttaatatatgcaatcttatatacacaacgagacggtcatcactttttttacttttacagtttccaaaaatgatgaccgtctcaacactcttcgttattcaatttttcttcctcttcgttctttcgaataaagttttcttgttatacttattatacttatcaatcgaaatctttgattttatatactttataaaataatttcgattctctttattcaattttgaaatttttctttttcagattctctcttcttttttatttcctgctcataaacgactgatatatgtaagtatatctcttcgattatttagaaagttttatagatcagaaatcattttttacgatgtttgatttcctgtttatctgaagaatttcggtggttatacttttttcctgttcactaaacaattctggacttaacttcttaaattcaaaaccatttgtcatctctgtactttgcgatctgctgattcaaatcgacctattgggattttctcctctgcagttctttaaagtatcctggaaaaaagttcctgcccgattcttctgtttttaatatcctctcagatattcttctgatgcaaagcttcaatccatatcctaatggttctgatatgcatttcaaagtatcgttctcatcttcacgtttgttcttggaatctcttctttccaacgaaccggtgagttgagggttttactctttcgggaaatatttctttacatatttcctgaaatctttgtatcaggtgtgtgacagttgttcaatatgagttaccgattctatattacctgaaatactggtttccttttgtttctgatttcttaaaatataagtaagatttaagaggatcttatttatatttcataaaagaaacttctgttttcttaaggtgtatcatatgtgatctgtatcaggtctttcttgcaggaaatccggttcctgtcactctcatattgatgatggtgtttgtttatgttcccactggaatcaccttttcctttcttcatccttcatgtgcatctatgctatgaattgaatgattttcttttttgtttttctcttgttgtttttgatggtcttataataacatcgttgcgggtatttgtcaatacatttttgtgtttttatgctattatttttatttatttgttttgttatgtgtttatattttataatttgtttgttttttttattattttctgttaatttatgctattgtgaagtcgtgaagaacgggatggtatgttgcaaacggacggtcgggaaggacgggaggggcgggtgaggcttcggaggtctagtgcttctaaggctgcggggattctgctaaaaccgctgaaaaaatcccagaactcgctaacgctcaaacagctgggatttttccagcaacgcagcctccccgcggcctaagaagtactacgactcctgcagagtcacccgcccctcccgtccttcccggcctgactttcgaacatggaaagttagttagaaaagtttctgtgtgactgtattggccctgcaaacattgcaatgtttgtactttacaatgtttgtactttgcaatgtttgcaggggattgagataaactttattcgaaagaacgaagaagaagaaaaattgaataacgaagagtgttgagacggtcatcatttgttgagcttttcttgatatttttaccggggctgggatttgtctctgggaatgtcagcgtgaggtgtcctgtggggagcaggggcttcggagtgagcctttggtcatacttggcgtctgaggtgacctgtggaaaggtattctgcggatacaggccgcagaataaggcccatctgtctgagccaggtacgcatcagcgtacatggcgagttataggccggccttttcacaggttgcctcagacgcttagtatgaccaggcgaaacgacagcccctgctccccacagggcacctcacgcgtccgcatcatccacatcccataaataagtatccataaccctaaaagtaaaaaagcagaccggcaacctcgattaaaacggtcaccagtctgcaaaacaacacggaaattcttaaattactatattccgctctgcagcatattcatgaacacagctccaacgccttcacgctctacatatgttcaatccctgcatctatttacgattataattgatcagacaacccttaaggatgatctctctctcatcatctgtcagctcacccagagttacatcgaactccttcaaagaatcaccttcaacagtatatcccttgatcacgtctgctttttcctcaaccgccttgcggattccagggaagaacaggtaatcaccgttcctgaacggaaggtctccagccgggatcaggaatggaagcataccccagttgatcagattggaacgatacctcttggttgcatactcattggcaatgtttgcccaaccgccaagtaccttctggcaggatgcagcctgctctctggcagagccatcgcccggtttcactgcaaagatggtgcttcctacgccaaggtttgtcttatcaacatccggataggatttatggatggtttccataaccggtttcagttccggaacagcctctgccgggcagttacctgcctgaattgccttctgtgctgcctgaatctcttttgcacggccaacataagccggatcctttctggacagtgtgaattctgcaagtccaagcggattggaacggtaggaggatgtctcaccagacgggatcagctcgtcagtggtagtaaccggatcgtggatctcggaaacaaccttcaggatcaggttgtctgcaagtgcagccatctccggccagtctttgatattcggtccaaactggatctctacgcttggatctgccacgcccttgctgtcaaatacacggttctcgtagatagacttatcgaagtagtatttatgctcggaatagcttccgtcaaactcctctgctgaggtaaggaatcccttgtttgctgctgtagctgcaatggaacgtgcatccataagtgcaaccgaagagatctgaccgttctggatcttggagccttcacggttcgggaagtttctggttgtatgacggatactgaatgcattgtttgcaggtgtatctccggcgccgaagcacggtccgcagaatgcagttttcacaactgcgcctgttccgatcagttctgcaagaacaccattcttagccagttccatgtagattggagtacttgccgggtatacacttaaggtgaaggcatcatggccgatatttttgcccttgaggatatctgctgcagcgcagatattctcgaatccaccgcctgcacagccggcgatgattccctgctcaacataaagcttgccatcaactaccttgtctctcaatgtgaacggaatctttccgtcaagacttacctgtgctctcttctccacatctgcaaggatatcgtcaaggtttgccttcagctcatcgatggtgtaggtgttacttgggtggaacggcattgcgatcattggtttgatctcactgaggtcgatctctacacagccgtcatagtatgcaacgttgcccggtttcagttctttataatcctccggtcttccgtggatcgcatagaattcctcgatcttcgcatctgtctgccagatggaggaaagacatgtggtttctgttgtcataacatcaacaccgatacggaaatctgcgcttaagctggcaacgcctggtccaacgaactccataaccttattcttcacatagccgttggcaaaaacctcgccgatgatggcaagcgcaacatcctgcggtcctacacccggacgtggagcacctttcagataaatagcaactactcctggcatattaatatcgtatgtctggcagagaagctgttttacaagctccggtccgccctctcccatagccatagttccaagtgctccgtatcttgtatgactgtcggagccgaggatcatctttccgccgcctgcaagcatttctcttgcaaactgatggataactgcctgatgaggcggtacataaactccgccgtactttttggcacaggtgagaccaaacatgtggtcatcttcattgatggttccgcctactgcacagagggagttatggcagttggtcagtacatatggtaccgggaacttctcaagtcctgaagctcttgcagtctggatgattcccacaaatgtgatatcatgggaagtcagtttatcgaatttgatctgaagtttctccatgttatcggatttattatgagccttgagaatagaatatgcgatggtattcttagcagcctcttctttcgctacaggcagatcagcctggttctcgggaatgatttcctgtccgttctgaagataaacgccggtatcgtaaagtttcatttcggttcctccaatctgtaatgattctttttttcataatttcgtttattatagaggatttttacacattagtcaataaaagtgagcacacctggtgcattgttttgtgtacaagcgttattgtcctgtgctttactttccctgcaaaatccgctatactgaagaccatatcggacggatattcatattctgccggctgtggcagtttcaatacggaggtactgtttatgtttcgtttatggggaaaaatatggaaagacaatcgcatgcttcaggacaccgttgtctgtgatgacagcgatgataccagaacccacaagatctttcacggacttgaggaaatctgttatcagatggatctgggaaatcctatctggctggatgccacagtgcgggatttcaaaaagcatgataaggcccgcttttatcaggataatttcattgaacatattgaattcgactacctggagatccaggtgatcgaggaagactaagtaacatataaaaggacgcaggaaagccacgaatgcttatcctgcgtcctcttttttcagaaatccccaatctgggaggtatatttcagaagatcatgcttactgcttttaatgaagtttatgctctcagccaggagaaaaatgtaacgctccgtatggcagcttacatggttgcgatcaagaggatcaccacagccggcaagctccgtggcggcccgatctccatgggttgatgaggtatagctgataaatttcttatcttacacaactgcatacataaaaaactctccggcggatacagagaatcgtatctgccggagagttttttttgcatccggttcccttattctggaatatctttgtgtacatttctgtattttctcaaatataccgggatatgtttttactctgcattcataaactcccgtatgatttcccgcatgatctcttcctcctccggagaaagcatcttgctgaagtgacttccggtagcagccgtctgacggatacttctggtgatcttatctacgatttcttcctgcagaacaggatccggcttttctgcgaccggtacttcctccacccaggtacggacctgttccacataatctgcaagagaagccatcacaagctcttccttataagaaaagtccaatgcctgacgaagaagaagcagtactaccggcactgccgcccctatataaagataaagcatagacaatccttccctgtatcccagtctgctgttgagaaaaacagacagtccaagaagaaatgtacaaaacagtgacggataccacacaaatcggttcatccgatgccagagcctgtcccttgatttccacaggttcagccatttttctttgagattctgtaatcgctgcgtatttcggatcattcttcggtaggtaaggtttgttgccagcatccccagaccgccgatacatcccatggatgtcatgacgtaaagcgggatgttcagcttcatgatcatctccagcataagccctccctttttcactgccgcacagtgcctgagcgtgcttttgttctttagccgcactgctcatcgccttaggaatattatacttctatataacttaactggaaagaattttcgttcgtcaaatgctgcccctgttttcggtctttttacatttcctgcagtgctttgactacattttcaaatttcatgaagtgagaagcctttacgaggatggtatctccaggtttcacatatgtgttcaggttcttaagaaggctttccagatctttttcccggatgactgtcaagtccggattggtctgagatgctttttccgcgatatgggctgcaagtggtcctacgcagatgcatgcatcgatcctgcactgacctgcatgaacgcctacaccttcatgaagtgcagcttcatccgttccaagctcacccatatcgccaaggatggcaacctttcttccaagtccgtcctgaagaacatccagggacgccttcatggacatgggatttgcgttgtagcagtcatctacgatcatgaatttatcggtctcgatcatattgaatcttccgctgaccggttccaggctttcgatgccatttttgatctgctctgcattcagtccgtaaagtctgcccacagctgctgctgccagtgcattggataccatatgacgtcccggcattggaatatctacatggaatatctggaactctccgttctctgccatttttcccttcagacagatgtcacagctcattcccttcaggccacggctttccacattttcacaggtaacagaagcattttctccgtttccgaaaaataccggctgcataccgttgtattcctttactgtggaaagcttatcatcatcaccgttaagtacgatatttctcttcacatactgaaaaatctctgtttttgccttcaggacgccgtctctgtccccaaggttttccagatggcaggttccgatgtttgtgatcacgcaggtgtccggttttgcgatctttgcaagacgggtcatctcaccgaaatcactgattcccatttccagaactgcgatctcatcttcatcacgaaggcggaatactgtcagtggaagtcccagctcattgttgaaattcccctgggttttcagtgtacggtatttttccttcagcacagaggcgatcacctcttttgtgctggtctttccaacgcttcctgtgattcccacaaccggaatatcaagctgctccagataaaactccgcaatgtcttttactgcctgaagggaggagcctacctggatatacggatgatccgccccttcaagagttctctcggataaggtcgcgagtgcacctgcttccattacctgcgggataaaacggtgagcatccacacgctctcctactactggtacaaaaagacctcctttttccatcttacggctgtccgttgtgatcgcagtcacttcctcctgaagtttttcctgcgggccgtggtaaataccattgcagacttttgtgatattttccaatgtaagatttttcatgaataaaatcctttcttttgccagaaactcctcctgtcaacaggaggagttacggtcagatattttatttgctgtatttcttaaaagaaatgcggatcagttcttcacagaggtccggatagtcgattcccaggacctttgcttcctgagggatcagactggtgggtgtcattcccggaagtgtgtttgcctccaggcagtacatatcaccgttttctttcatcatgaagtcaaaacgtgcatagccctcaatgcagagagcctttgcaccagcttccgcataatgctgcatcttctcagtcagttccggtgagatctcagccggacaggtttctactgtggagcctgcctgatatttgttcttgtaatcataaaagccctgcttcggtgcgatctcgatgatcggataagcctttccgtctacaactgcaacggaaaactcacgacccctgatatactcttcaacaactacctcatcttcataagaataagcaccatcaatggcatcctcatattctttctggttgtttacaatataaacacctacgctggaaccaccgcagcatgtttttacaacaacaggaaattccataccaagatcatggatgtttcttgtacagttttctttcaacatggaaacgcccttcggtgtcggtacctgatccatgagaaagatcttcttggtgagacccttatccatagcaagggcactgcttaaatatccggttcctgtgtaacggatccccagaagatcgaaggttgcctgaacctttccatcctctccgttggaaccgtgaagtcccataaatacaatgtctgctgcctgacacaattccagtacattcggtccgaaaaagcttcttcttgtgcgtttgatctcttcgatatcatcatcgaagcttctcatatactctgccgcagaatctacctcataatctttatctccaaagggctcatcccagtccaccggctccagtccgcagaaaatatctacaagaatggcattatggccttttttacgaagtgccttgcagacaccggttcctgttacgatggagatctctctttctgtactggttccgcctgccaatacaacgatattcatactttcatctcccttgatgatcttgtgttttcttttttcgtattcttttaatatttcttttaatctcttattcataaactacgattggtactcctacactaatattattataaatgattgccgccttatccttcggggtgtttacacagccatgagaaccatttgtgatatagatctgcccgccatactgtgaacgccagcttgcgtcatggattccgactcctccggaaaacggcatccagtatgtaaccggtgatgcatatccaggtcccttcaaaactgccggtgaacgcatggcatccagtgcaaagcatccggttggtgtggaatggccctttcggacacagccggtaactaccggtgtatctaccagaagctgtccatctttatagaataccattctctggttggtcaggtcaatctctacatatgtatttccgatatcattggtatctctgcaaagtccgctgtaagcatacgccggctgtctcacttctgtagttcctgcaagaatggcattataaagccattcagtctctgcggtctgatcgatagcccatccgtaatcaccgcctttaatggttttctggcggccatcgtaggtggtaaatgtcctcgtgcagccaaaggtatcatatttatatcccaggctgttcacataagctgcaacctgatctttatttactatataatctccgtttgcgtccctgaccagccagtctttgatggtatttcggtcaagctgttccgaccggtccgaaaaatcataggtgatcacgcagctgataatcttgttcatctggtcacaatcttttttcagagcttcatcgtctttatatatcgatggttttttgtagcagtttttcttttccagactaactgttttgtctcctgcggaaacagctgcacggatcaccttctgaaccttttttgtatccagggtcgttccttctttttccggctggatctcgtaggtttcgccattatccttaatgcatgcgtctgcaggcttttccatattgtccttctgcatgcatttcagattcttcacagcctctgtcagcttgttctgatcttcataagcagtatccgttgccagtgtatattttttcttctgattaaaagcaaggaaccatttgtaccgggcctgtttcttgatcagctttttggctccgccatccggcttatagaccaggccggcttcttttgcggtaatgctctcttttccgttgtttcttgtatcaacggtaagaacatatgcctgcacttcctttgcaagaagcttttctgtttcatctgcagttttataggagcagttaaaaccattcacctgagatcccggcaaaaaatgatctgtaaaatagtgtacaccatatccataagcccctgctgtaaggatcagcaagatcatgatcagtgcaataaccaactttttgcctgttttcattttttctttttcctcatccatgagctctctccaatagttatgactgcccggtattacgcatgctgaaataccgggcagtctgatgtgatcgatttatttctccagaagtttttccacacttacaagcttcacacagagaacaaatacctctgctgccttgctaagctcctcaacgcttgggtagcttggtgcaatacggatattgctgtctttcgggtcctttccatatggataggttgcgcctgctccagtcataacaacgcctgcttcttttgctttggcaacgatggctttcgcacagccttccatagaatcaaaggaaatgaaatatccaccgtgaggtttggtccactcaccgattccaagtccgttaagctctttatccagtgttgcgagaacaagctcgaatttcggacgaaggatgtctgcgtgtttcttcatatgctcatgcagtccgttgatatctttgaagaaacgaacgtgacgaagctggttcagtttgtcgtgtccgatggtctgtacagtcatgtatttgcggaagtcatccaggttcgccttggatgcagcaactgctgcgataccggaaccagggaagcttactttggaggtagaagtaaatttataaacaatgtccggatttcctgctttcgcacactcatcaagaatctcaagaaggaaatcctgattgtcatcatagagatgatggatgctgtaagcgttatcccagtaaatacggaagtccggtgcagccggcttcagatgcgcaaaacgcttaactgtttcttcggaataagtgtagccctgcggattggaatatttcggaacacaccagattccttttactgccggatcttcattgacatatttctcaaccatgtccatatccgggccttcctgagtcatcggaatgttgatcatctcaatgccgaaaaattctgtgatacggaaatgacggtcgtatcctggtacaggacagaggaatttcaccttgtcaagcttgcaccatggtgtatttcccattactccgtgggaataggaacgtgcaatggtatcgaacattacattcagactggagttaccataaatgatgatattctctggctctacctctgacatctcaccgagaagtctcttggcttccgggattccgtcgatgactccatagttacggcagtccacaccggtctcacatttcagatctgcatcccctgcaagtacttccatcattttcatggaaagatcaagctgatccggtgcaggtttaccacgggacatatccagtgccagaccttcggctttgatctcgtcgaactcacggtcaagttctttctttaaatcgagtagctcttccctgctcatctcacaatattttttcataagtttgcttctcctctttttgtgcacagtttcatatctgcggttgctgtgtttcttctgttaacgatttctgtctgtcaggaattctctgcaaaatctcttccgcaaaaaacagccacagtttcacggaagcgggaagcctctgccccggcagaaaatctctgcgtacattttagtatgtaaaagcgctgttgtcaaatctttcgtggaaaatcctgtacttctcttgcacagcatccatttttcctctatactggaaaaaacattattatggcgtttttatggattcatgtcccgatcagccggatctggtacagtaatctccggaaatgctatataaaaatgctatatatatcttataaatttactattatgaaagaggtattgatcatcatgtggattgcagatggatggaaagaatatgaagttattgatacatcaaaaggagaaaagctggagcgctggggggattatcttctggttcgtccggacccgcaggtaatctgggatactccccgcaaaaaccgtggctggaagcatatgaacggacattatcacagaagcagccgtggcggcggtgagtgggagttctttgatctgcctcatcagtgggagctccattacaaggaccttacttttaatctgaagcctttcagcttcaagcatacaggacttttcccggagcaggctgtgaactgggactggttcggtgaaaagatccgcaatgcgggacgcccgatcaaggtgctgaatctttttgcctataccggcggcgctactctggctgcagctgcagccggcgcttccgttactcacgtggacgcttccaagggtatggtgaactgggcaaaagagaatgctgctgcttccggactttccggtgcgccgatccgctggcttgtggatgactgcgtgaagttcgtagagcgtgagatccgcagaggaaatcattatgatgcgatcattatggacccgccttcttacggccgcggacctaagggcgagatctggaagatcgaggatgcgattcatccgctgatcaagctttgtacgaagatcctcagcgatgatccgctgtttttcctggtaaattcctatactacaggtcttgcaccggctgttctgacttatatgcttgccacggagctaaaaccctggaagggtaatgtggagtcacaggagatcggacttcctgtaacagaaagtggtctggttcttccttgcggagcttccggacggtggagctcctcccggtaggatagggatgttgtggcatccttattagctggcacttttttctgctgttgcaaactgctgtaaatgaagatttttcctttcagggggacactttggcgtgggcaggtttgcgagaaggggaagcactcggagttgcgaaggccgtctccccttctcgcgctcttcccctcctggccacgccgttgttcgacgttttgggatgtgattctgtattggcaggatgatggattctactgtgttggatgtgacgcattgtgccgatttttatccttactattcaatggtaatattccgcgaggtgttttttgtgagcgaaggtcacagaaagcccgagacataccgcgcgaatttatacgatcagtataaattctgtgcatcacaaagcgtattactgaaaacggagtgaacagtaactttttatcaggtatctttttgtattttctgattatttgtattgaaacgcttttttgataggtctataatatagaaaaaaggagcgtgatctttatgagtacggaaactacgaaggatactcttccttttacctgcacgccggcttataaccgggatgcctgtaagggatgtgtctgttctacctgctatgagcaggaattttgtgaccggtgcagctcctgtgtagagcagggacatcggaaagaacgatgcaatgcttatgagggagcctacaattactaacaaaaaaaggatctgaaaagggcagaactatttgtaaaatctcgccttttacagatcctttttattattatccaccacccaacagatcggcacagcctccccttctcgacacccccgaatcccgcaccctgtcagaacattcacacccactacaacgccgaacagcggcgtggccaggaggggaagagcgcgagaaggggagacggccttcgcaactccgagtgcttccccttctcgcaaattaccgccttccaaaaggccgaacctttatccccaaaataaaaaattataaaaaaaagagaccgtcagaccaataaagtccaacagtctcaaaaaagaaaaaaactctttttattcttacacttttttatttattcttaaccttctccagcatctcttcagctctctcaatctcactcttctcatccttcggaagaacaatattaagaataatcgcaaataccgctgccggaacaataccggaaccgccgaagatcaggctgatcgcctgtggcagatgcaccaggatcgctgtattggagccaagtccataaccaagaccaagtgctacggaaacgatcgtaacatttcttggtccgatcggccacttggtgattaactggataccgctgacaacaatggatgagaacatcataacagcagcgccgcccagaacgctctgcggcatgatggagatcagtgctgcaagcttcgggaacagtccgcatgcgatcaggaagattcctcctgtagcgatacagaaacggtttacaaccttattcattgcaaccagaccaacgttctggctgaaggatgtgttcggaagcacaccgaacagtgctgcgaaggaagatccaagtccgtcacacataacaccaccggaaagctctttgtctgtagcctctcttccaagaccaccctctgtgattccggaaatatcaccaactgtttcaactgcagttacaataaacatgatcaggatcggcacgatcgcacgtgcgtcaaacacccattttacaggcatcagtgccggtaccgcaaaccattttgcctgagcaaccttgtcccagttgagaacccaggcctttgtagcctccacagtagcacctgtgtcatctacatatgtaaatgttgtaggaagtaccatagccatgatacttaccagaatgtatcccacgataataccgatgaggattgaagaaaagcttgtgaagccttttgttccatgcttcagtacaataatcacgatcagaactacaaagcctacaaaaaggttttcaagagaaccgtaatcctttgcggagcttccgccaccgaaagagctgattcccacaccgatcagtgaaagaccgattgaaagtacaactgtacctgttacaacagatgggaaaaattttctcaagggcttcagaaagcttcccagaacagtctcaaaaagaccgccgataaagcaggctgccatgatcgaaccataggcaacgacaccatttcccatgactccggcaacactctgacatacgccgatgaagcctgaacttgttcccataacgataggaagcttgccaccgaccggtccgatcgtaaagacctgtacaagtgtaacaattcctgcgatcagcattgcattctgaagtaatgcaacctgaagatcccctcctgcttcgatcccgcaggcagctgtgatgatcagaagcggggtaaggttacccacaaacatggcaagcacgtgctgcagtccaaggggaattgccaccttaagaggtgggcgtccgtccagctcataagggctggctgtgtttttctcctgtttttccataatgaatccatcctttctttccctatgtcctgacgataacataaaaaagaaggcagttatacccactgctgaatataaccgccctgttatctgtcagtacacgtatcgtgtctcttctgtttcgacactcttatctgaactgttatttcagactcctgaaaaacgggttcattatacagtatcccaacatctatatcaagtgttaattaacaagttgttgatttttttgcagctttttttgcctggctttcactccagagctcatcggcctgtttcttccatacctctgcatagtgatcacattttgcacagagatgctccgctgtctccggagactgaagatctgtagatttcgctcctgcacgctcaaccatcttgcggagaagctcaggattttcaagcatcggacatggacgaagcatatttttgttgaacggctgacccttgtgatactccataaagatcgggctcttcagcgcctcaaggagtgtacattctttaatgttcgcattggagaaatgaatgaatacgcaaggatccacgtctccgtttgcattgatatggaggtaacggcggccacctgcgatacatccgcctacatactctgcatcattctggaagtccatagtgaagagagattttgtggcacggaatctgcggacgctatcgtacattttgattctctgctccggtgtgggaaggagatctgctgctgcatcatttccaaccggcatatagtggaagaaccatgcaaaataagctccgcactcaatcagatgatcaaaatactcctcactgcttactgcatctacgtttgcggatgtgtagcatgtggaaacaccgaacggaaggccatgactcttcagaagctccatggcgtgcataaccttctgatatacaccatcaccacgacgtccgtctgtagttgcctctgttccctcaaggctgatagccggaacgaagtttttcacacggagcatttcctgacagaattcttcgtcaataagagttccgtttgtgaaggaaaggaactcgcagtccggattcatctcacagatcttaatgagatcctttttgcggaccagtggctcaccgcctgtgtagatgtacatataggttcccagttctttaccttgttttacgatagaatcgatggtctcaagatccaggttcagcttgtggccatactctgctgcccagcatcctgtgcaatgaaggttacatgcgctggtaggatcaagaagaattgcccacggtacattgcagtcattctcttctgataccttttcctgcgttgcgcttcccttaagactggcatttacaataaagttacggaaaaatgtctggcgtacgccggcatccagctgatacatacgaaggatcagctgataccagttgtcctttgcctcgatggagtgacggatcgcatttctctgtcctgcataccagccatccggtgttactttatcaaccatttccatgatcttcggtatatttgtctccggatccttctcaagataatccagtgcttttgttacggtagctgcgatcgctgcctgttttgctttgtctacgattcccatactctatttcctcctatgttattatctaaagtgattggttatttttatgtttatgtttaaagccgactcttgatgatcttgatcgtcaggatcccgacccatagattgaggatcccttccagtaaaatggaaaatcctaccaacaccatcatcatagctgctgcttcaaatggtctgataaaaaccagaactccgatcactccggtgaccagtgcgatcagcaggatctgccaccacaacgccaaaccgaatctcttcgcatctacagacatctggaccttaaacaaggcatctgccaggatcagaattccgaacacggaaaaaataagatccactgcgaaattttttctggctatcaggatcactcccactgccatcatcaggattccgaaagccagatcgaactgaaatgccagacagaaagcatctctcgtgaaatatccgctgatcttaatagctccgtacagaatcagcatgattcccatgagcacgcacagcatttttacagagcttttgggccttgccatcagaaaaatacccagcacacagaacagtaatgacatgacgatgtagatgttttttacaagcttcagctgtttcaggtcatccatacgttccctccttgataattttttctcatttattgtactgaattatacatccctgtgtcgtttaaaaaaacagacaaaaaagagccagtgcctaaatttcagacaccagctcaaaattaaccgtttctataccttaataaaattcgaggacattcctgttctacactaaatggatatttttaatcttcatttagttgagatcatagcttttatttcagatttttgtactgactctcaaggctcttctcgtaaatatactccagcttatgcatatctgacaggatatcataatccatatcatgccgtagccagtccaggatcactcccacaaatacacatttataataccggcttataagatgcctatcttcctgatccatttcaaagtctccgaccgccctgttgatcagctcctccaccacacgctctgcggcatgatccagataatcggcaaatacatccctctggatcgagcggtacagatgtatcatggcttttttgttcttctgaactgcgttgacaaggatttccatacagtcgctgactgattccggtactttctgatccttcagaatgtcattcagctcttcctttaccattgcttccactgcatccggaatatctctgaaatggtagtaaaatgtattcctgtttactccacagcgttccacgatgtcctttaccgtgatcttggacaatggtttttcgttcataagttccgtcagtgtatgcagtatgatctgtcttgtaaaacctggcattttctctcccccatcacaagctttcctcgggttatttccttattatgtcataaaaataacatactttcaagcaacaacatgttcgaaaatgtccataaatccccggagatctttctctcgataactgtcccatgacctggctgaacaaggttttgtcagatctcttctttctgttcctgcacttttttctctggctgaacatgaacgattccctccacaacggtatggtttctgacctgatttaccacaatatccaggtttttccagctgcatcggaactgttctccgtcctccggtacacgttccagaactccgcagacaaagccgctgaaagtatcatatttttctacaggaagctccacatttatgacctctgccacatcatccaggatcgctcctccctgtattttccagatatgttctcctgtcttctcaatatcatccggcttcggcagatctgtcctgtcgtcaatatctcccaccagcgtctccacaagatcatgcagagtgacaattcccacaaagcagccgtattcatccagcactactgcaaaataatcccgtttttccctcatttcccggaagatcaggttggcacgcatggattccggtacaaaaaacggtgaataacaggcatgctgcagaacagcttctctggatctgtcatccaggcggaaataatctctggtgtccagaatatggataatatcatcctgatcttccccgcataccggataaaaggtgtgacggttctctctgatgatccgttcccattcctcatcggagtcttccatatagaggacaaccacatctcttctgtgtgtacagatctcatctgccgcagtatcatccaggtcaaaaacattctggatcatctcgctttcttcctgctggatgctgccctgttcatttccctctgtaagcagcatacggatctcttcctctgtggcctgctcctctttttcttccggtttgatccccatcagatacagcacaccattggcagttactgtcagaagtgcagtagccggccagactgcgatcatcgcgatcttaagaagtcctgccagacgcagagacagctcatccggatttttcattcccagacgtcttggcaccagttctccgaacagaagacttacataggaaagcagtatggtcacaatgatcatgcatacgatcttcagaacattctgtggtacatctatccctgtctttatcagtgcctctgtcatcggctgtgcaaaatattctgccgcaaaagcgctctgcagaaatcctgccgtagttaccgttacacggatcgctgtcataaaatgtgccggctgttctgtaagctttatcaaaatctgcgcccggtgatctccctcttccgccagctccctcatctttgcttcattcatggacagaatcgccatttccgcacctgcaaaaacagagttcagaaagatcaggaacaccagtaaaacaattgcctgtatcatatttttattcccctcagtatagtcgtccggaattattccgaaccaattataatacagaaagcggaccgttatcatccgctttcctgttgcttattctgattattattacataagatagcataacccttccggtctgtcaaaccatcaacctccaaccagcaatatactatgatataaaaaacagcagatacatacaacagaacggcctttcatcttccactctgctgcatgcctatgaacatcatcgctgcacgacctatgttcactctgctgcttccttttccatatgatgtttcggaaattccataatgatctcggttccctgtcccggttcactgttaagccacagcctgccgttcagagtttttaccccgtgcttcacaatggaaaggccaagaccggttccgccgatttccttggaatggcttttgtccacccgataaaagcgttcaaaaatgcgttcctgatcttccttcggaataccgatccctgtatcccgcacattcacgcgaactgcatcctcgccatccttcagtctcacaaagacctctccaccccggcggttatatttgacagcattatcgcagacattatagagaacctcttccatgatcgtcggcactgtatccagcactgtacttccgccttccatatacatatgcacttcctgcttttcggcagcttcatgtaaggtagaaaaaatatcatgagtcagactgtaaagatccagtttttcccactgatacggcaatccgccctcatccagacgggagatccggatcacatccccaaccagacggatcagtctctgcgcttccttatagatgcgtcctgcaaaaaccttcacatcctcatccttcacaaatccgtcctgcatgatctcagcaaatccggaaatggaagtcagcggcgttttcagttcatgggaaacattggcggaaaattctcttcgcagctgttccctttctactttttcggtcacatccaccagaaggatcaccgcaccctctgtcttattttctcttgtgacaggattggcgatcacctgaatctcattgccatccagacgaaggatcttgttctcatgctttccttcaaggacctgcccaacgacacctcgaaactcctccgagcggttcagaagatatacactttctcctgttttgatctcctttaccttaagaagctttcccacactggagttgacagaaagtaccatggtataacggtcgatcacaagaagtccctcctgcatgttctccgtgataatagaaaattctttctgctgtcttctggctgcctcaagctgcagacggatctgccggctctgtctgccgatcttgctgagaagcggctgtacctcatcataggcatcattctcatccggatgctccagatcaagcccattaagaggttccacaaccttcccggaaagcctggatgcaaatacgccggacaggagcagcataagtatcagaactgcagcaaaaggcggaagcagctgcaggagcagcatccatacagaagcctggttactggaaactctcagcacattgccattttcaaggcgtactgcataatacattgttttttcggaaagcgtggatgacattctttcatccgcaccttctccgttgatctctgcttcacggatctccttgcgatgtccgtgattatccatgctttccacatttgcctcattgtcgtagataacttttccactttcatccacataagtgatcctggaatcctcatcattcagcttcttcagataatctgtcccggtactttccacacctctggaaatatacacggcttctttcttcagctcacccatcagctgtccctgaaaatagtgataaaggatccccacgacaaatgccagtcccagtactgtgatcagtgatgaaaccagcatgatatacttaaatatttttttactcaaagctcagccctttcctttctccgaaatctatatagcattttacaaaagcaatgtaaaaataattatctggaaaaagttaaatccttgtaaatttcatcacattataaaaagtgctgtgatattctttcaataccacagcacttttttacaataatgcaactcttgcaatctgctcttacttatttctattcctcaacaaaatagttatctgtatggctggaaccgcttctgtggtttcctgtgatggaatattccacccactctgcaatgttcacagcgtgatcaccgatacgctcgaaatattttgcagccataaggatatccagaccgatgcttgcatccggctttccgttattcaggacctcggccagcttttccttaatatcattgaaggcatcgtccaccttatcatcatcgtcaataacctttctgcaaagctcaagatcaccctttacaaaggcatcgatgctttctgtaaccatccggacagtatcctctgccatcttccggatattaatgatatccccggtaactgctttgtcctcgatatgcttggacagatccgcaatatctgctgcctggtcaccgatgcgttccatatcggagatcatcttcagcgctgcggaaatggaccgcagatctccagctaccggatgctcatgaagaagaagcttcatacagagattttcgatctctctttcctgtgcgtcgatctctttttccgtctcaaagatcttgccaatgagagtcatcccgccttcaccctgaatagttttggcagaaagtgaaattgctttttcgcagagacttcccatggtgatcagttccacgtgaagctcttccagctgtcttacaaaacgttctgacataatatcaaccaaaccttcctgtaatataatcctctgtacgcttatctgccggcatggagaacagcttgtctgtatccgcaaattccacaacctcaccaagaaggaaaaatgctgtcttgtcggagatacgggttgcctgctgcatgttatgtgtgaccataacaatggtgtaatcctttttaagctctactgccagatcctcaatcttggaagtggagatcgggtccagggcagatgtgggctcatccataagaagcacctccggctgtactgctagggcacgggcaatgcagagacgctgctgctgtccgcctgacattccaagagcactttttttcaggcggtccttgacctcatcccagattgccgcatcacggagagatttttccacgatctcatccagcttcgctttggaacggatgccgtgtgttctcggaccgtatgcaatgttatcataaatgctcatcgggaacggattgggcttctggaataccattcccacacgtttacgcagaagattcacgtccatatctccgtaaatatcttccccgtcaagctctacctttcctgtaatggaacagccttccacaaggtcgttcatacggtttaaggatttcagaagtgtggatttaccacagccgcttggtccgataaatgctgtgatctctttttccgggatttccatattgattcccttcagggcatgaaagtttccgtaatggagattcatattgtcaattgaaatttttgtattttcactcatgatcgatcattatcctttcgcaatttttctggctaccagaccggacagtccgttgataacaagtacaaatgccagaatgactactgctgttgcagatgcctggtttacatgaagtccctcactggaaagcacatacatgtgaagtgccagggtacgtccggaacccatcaggctgtttggaactgccgcaacagtaccggaggtataaagaagtgctgcagtctcacctaccacacgtccgatggccaggatcacacctgccaggattccaggaaccgcggagggaagtacaatcgtaaaaatagtacggagcttgcctgctccaagtccgaagcttgcctcacggtaagaatccggaacagatttcagtgcttcctcagcagtacgcatgatcaggggaagtaccatgatcaccatagtcagcgcaccggaaagaagagacatgccccagtgcagtgcagttacaaagaacagcataccgaacagaccatatacgatagatggaataccggaaagtgtctctgcggtaatacggatcagctttacaaaacggctgcctttttttgcatattccacaaggaagatcgctgcagagattcctaccggagcggcaatcgccagagataccagtgtcatgatcagggtattgatcagtgacgggagaagggaaacattctctgaggtataggtaaggctgaacagacttgcattcagataggggataccttttacaagcacatagccgatgaggaagaacagcagtgcaaaagtgatcactgctccaagcagtgtgagaaatgccaggactcctgcgccaggatgtcttgcataagacttcagctggtctcctatggtaagtgtatttctttttttcatggttgtttctgccgcaggatctgcggttactgatacgttagtttgcatgctccgccctcctgttcagcagtgaaagacttaagttgatgatcaggataaatacaaagagtacaactcctgttgcgatcagtgcttctctgtgaagtcctgatgcatatcccatctctgttacgatgtttgcagtcatggtacggacaccctgaagaagtcccttcggcatacgtggctggtttccggctaccatgatcacggccatggtctcaccgatggcacgtccgatcccaaggacaacgcctgccaagattcctgactttgctgccggaagcataacaaagaaaatgcttctttcttttgttgcgccaagtgcaagtgagccttcatagtagctttccggaacgcttcgtactgccgattccgtaactccgatgatcgtcggaaggatcatgattcccagaaggatacatgctgccagcatactgcttccggttcctccgaacagctggcggatcagcggtaccaggagaaccagaccaaaatagccatatacgatggatggaacgcctgccataagctcaataccggatttcagtggtttatagatttttttcgggcaatatcttgccataaatacggatgtaaaaagtgcgatcggaactccgataaggattgctcctgcagttacataaatacttgccacgatcattggcaggattccgaatttatcgtttgttggtctccattctgttccgaagaggaattttaagggaccgatctttcccattgcaggaaggccgtttgcaaaaagaaacacacagataagaaatactgcgagaaccgatgcacaggccgcaatgaggaaaacgaccttcatggccttttctcctaaatgattcataagacacctttctctctgttccagtggatatccactgtgctgatatataacggagcggctttcctgaccttgtcatgatcgccgctctttgtaagatacttcaatcgttttttatccgggaatttatttggtcacgtcttcccagtctgtgatgtcacctgtgaagatggattttacctgatcacttgaaagctcctcaaggtcattgtcgttgtttacgatgactgcgataccatcttttgcgatctctgtagctttaacacctttctctgtttcctcgtccttcagctcacgggatgccattccgatatcacatacaccctctgttgcgctattgattcctgttgtggagtcgctgacctgaacctctactgtgatgtttttgtttgttttctgatatgcctctgcaagcttctccattacaggtcctacggaagaagatcccataactacgactttgccttttgcatctccggctttgtatgcctctgctttttcatctactttgatgtagccttctttttcgatgatgtcctgtccgtcagagctcatgatgtagttgatgaaatcctgtgctgcatcgctgagcttgtcgcctgttacgatgttgaacggacgtgctaccttgtatgtatcatctgcaacgttctctgctgttgcctctgctccgtcgatctttactgcttttactgtatcgttgagggaacccagagatacgtatccgatagagttctcatcgcctgctactgtggtaagcattacatctgtgttgtttgtgatgcttgcttcctgtgttgtcatatctactttctcgccgtctttttcttcttcgatcccaaacagctctacgaatgctccacgtgttccggatccgtcctcacgggaaattacgtcgatcgctccggacggtgctgccattacaacggttcccattactgtagttccgataagtgctgctgttaagatacctgcgattctttttttcatgatttttttctcctcatttctatgatcatttttacttgcttactgcttaaatacaggtgttattataggaatggaaggtaaaatataaaatcgcggttttgtaaaatgttagtaaaaaaatgtgatataaaaaaagctgcttgcgcagctttttttatatgatatattcgtccgccttcacggcttgccagttcatcaggtcttccagtgttatatgatctaccacacctttgatagcatcgtccagctttttccagaggatctgggtgacacagttctcctcacggtcacagatggctccgttgtcgtccagacattccacaggagaaaggcttccttctgtgagacgaaggatcattccgaccgtgtatttatccggggtctgctgcagtgcatagccgccctgagggccacggacactgcggacaaagcctgctttgttcaggatggatatgatctgctccagatatttatctgagatctcctggcgcttcgccacatccttcaggcggatcggttttcctgtataatttgtagcaagatccaacatcagtctcagcgcatatcttcctcttgtagaaatcctcatgtaatatttacctccaatatttcagtattcttctgatttatagcctttcgctctttctgttattgtgcagctgttcggccggaaatattcctctgtattccataaccggcacccttctctgtgatgcacaggcagcttcctgtatcttctttcataggaagcagaatctgctttgcagactttattctttatattgttaataggttttgtttgttttctctattatacctgaaaaagctacaagatacaagcaagtccccacacactgcttattgcttttcgcgggaccttaccagtgaacagtaaccacagccccacagagggcttacttaattcgatgaaatcaagaataaaaccggcgctccggcagcctgcttggacaggcattcaggagcgccgtaaataatcccgcagaatcacgcttcggggcaaaagaagcggtcttcggatcgattattttgtaaacagtggtgtggagtagtaacggtctccactgtccggaagaagtgctacgatcactttccccttgttctccgggcgttttgcaagctggatcgcagcatagagagctgcaccggaggaaattcctgtaaggattccctctttcttggtaaggagtttggatgtttcaaatgcatcctcgttctctaccgggatgatctcgtcataaaccttggtgtcaagtgtgtccggaacaaaacctgcgccgataccctggatcttatgcgggcctgcttttccctcagaaagtacaggagaagttgcaggctcaacagcaactaccttcacattcgggttctggctcttcaggtactcacctgtaccggtgatcgttccacctgtgccgacacctgctacgaaaatgtctacctttccgtctgtgtcattccagatctcaggacctgttgttgctgcatgtgccttcgggttagccgggttctcaaactgtcccgggatgaagcttcccggaatctccttggcaagctcttctgccttggcaatggcccccttcattcccttggctccgtctgtgagaaccacctctgcaccatatgccttcaggatgtttcttctctcaacactcatggtctccggcatggtgaggatcgtcttatagcccttggcagctgcgatggctgcaagtccgattcctgtattgccggatgttggctcgataatggttgcgcctggtttcaggacacctttctgctctgcatcctcgatcattgccttaccgattctgtccttaacgcttcctgccgggttaaaatactcaagcttggcaagtactgtagcctcaagtccctcagatttctctacgttcttaacctctacaagcggtgtgtttccgatcagttccagtgcgcttccgtaaattttacccatgatgatatcctccttatttcctttatgtccatttccttatttcctagtaactatatatgctttctgtgatttgattgaattatatcatagtacagggatttgtcaatacatttcagccaaaaaacgcaggaatttttctccggaaaaacccctgcgcttcatataatttcatttattcttttttaggatttttacaagcagatgcatagtcaggcggatattcatattctttatttttcagattctgttaatgtaatatccccatcgctgcattccacatttaaagtcggtgctgaagcaccggccttgttctcataaacagaggtgtcttcctcattgtcggtttttcccctggaaagcccctccgtgtccacatctccgtctgtagctttcagataaatattggttttctctgcactgccgttcttcatttctacagaaacatcaccgcaggagctattgatcttcatatctccgttaaagctgctgttgtctatctgaatatctccgtcgctgagagctatctgcccatctgcaagctctgccttttttatggtcacatctccgtttccggatttcagctgcatgttatctgtacattgaagttcttttacattcagatccccgtcggaaagctttgcatcaaacttttcgaactcgcccttatccagcatcagatctccattgagaagttccagggtcatttctttacacaaaagctgatcggcagcaagatccccgtcggaaagctgaagctccgcttcggaaagctgtgccttctccggaatataaagaaccaccgtattcaatgcatctttcttttctgtcagatccgcatgtgtagaaaatatccccagatcataggttatataataacttccactgccgcctgcaggctcctcaagcgtgagctctccatccttatccttccaggtcagaggatttttcctcccgtttttctcaagcttatattccatataataatggtcatcatctgaggtacggatatccagatcaaaatcctcaaaatccacattcagcttcgtaaaatcatcaatctgttcttttttcattactgtaagatttttacgactggaagaatttcctccggatacatacatatgatctgaagtatatgtgaaatcttttccccctgcaaaatatcctgctgtggaaagaacaactcccgctacacagagtgctgtacctgtcatcagcactgtttttgcaatcttattcatttttatgcaccttctttcttacaagtctgttaaccagacggccgattcccattgcacaccatttacatatatatatggtaagtactccaacgaggattcccgcacctgccatcagaaatccactgccgaccatcatgcaggctgctgccagagatcttgcgatcaatgtcacgccgaaacctgtgagcacgatacctccggcaattgctgatacacctgtaactgccatggaaaagatcactgctgcgatgacaatcaccactgctgccagtactgcaagacctgcaaacagcagcgcaatgctcaccggcgatgcacagatcaccagaaatgcgagaagaatgatctttccgggggaacgcttctttcctgcggatgtactgtaccctgttgtactcaggtttcctgaatctgtccggctatgtgcatgggagctctctccgtaatatgaacctgctgccggcaaagctgctgttttttcttcggtgatgtctttactgtcaccaacactcttctgtaaaaggttcagaagcagttcccttgccgcctctttaggctgtcccagttcttccataacctgctgttcattctcaggtccagcctcatcgaagtattccgaaaaatactcaatggcattgtcataatcttcttttggaagccgcttcagatatttcttcagctgctccatatactcttttcttgtcattttcgaagtctcccttccacaatatcgtctatagtatcgcggtattctctccactctttcctcaaatattccagctgcttccgtccgtcttctgtgatggaataatatttacgtttccgtccctgaaattcctctgaataagttgtcagataaccatccgtctccagtctgcgaaggatcggatacaatgtggattccttgatagaagctaccatcttcactgtctggctgatctcatatccgtaagaatcctgctgctctacaacagaaaggatcaggcattccgtcagcactgcagacaccggataataatacataggcacacctctttatataattattttatatataaaatttttatatataattattttacatatatagtaccacactttttcctgttgtcaagcacaatttcgcaattgctttttccagactccttctttataatatttacaaatacaaaatactcacccagaaaggacttgagcttatggaaaaaaagccccatctgatggcgatcgtcctgtttttaacgggtcttatctgtattggattactttttggactcagctataaaacctaccggaagatcgatgccgttgaccagaaaatgacctctgtgatcaaaccggtccagaaaaagcagaaatccatgaaagaggatatcgaactttatacagccaagatcgaaaagaaacaggcagccaacaaatacctgcagcagcgggcacagacagaaaaagctgtcaaaaacaacaccgttgaacatgaacgggcaccggaagccgaaaacagtcagaaaacgaccaaaacctctgttttcagtgaagccggtggtgagggattcaccgatggcggtaatgatacctcttctgcttccaacaacggccatattgtcgggatcgatcccggacatcagagtgaaaatgttgatatgagcgccacagagccgaacggccccggttcctccaccatgaaggccaaggcttccaccggaaccagaggctccttcagcggtctcccggagtatcagctgaatctggacgtttctcttctgcttaaggatatcctggaacagcgtggataccaggtaataatgacaaggacagacaatgataccgctatcagcaacaaggagcgtgcagaactggtcgcttcccagggtgcggagatctgtgtccgtatccatgcaaacggagatgattctgcagatgtctccggtgctctgaccatgtgtccgtcccagcagaatccttatgtttccagtctctatgacagttccaacaaactatccaaatgcattgtggattcctactgcgcagctaccggtttccagaaccgcgggatcatctacacagattccatgacaggtattaactggagcacgatcccggtgacgattgtggaaatgggatttatgaccaaccagagcgatgatctgaaaatggcggattcctccttccagcagactatggcagaagggatcgccaatggaatcgatgcttatttccaataataaaaaggagtttgtttatatatgaaaaaaaatacatttctatatattgtgatcgcagtgcttgtcatcgcactggcaggacttggggcactgaatgtccgctccctggacaagcttgcatctctccagacaaaagttaacaagctgcagaaaagtgtgcaggaggtttctgattctgccgctgagctcagcagcaaagccgatcagctggatgctctttatcctgatgatcctaccgtttccagcgctgctgccgcagcatcttcagctgaggtccagggtccttccgaacaggaagaatccacagatacatctgcagcctccgattcttccgaagcttctggcagcaaggacagttcttcttccactcaggaagaaggaactctttctccatccagcggaagcactttcacagacaattcggattccagcatggacaaccttctgaatcaggtacagtctcttcttcccaccgataacggaacctggtccgtatatgtatgcaatcttgcaaaaaataccgaaggtaccatcaacgatcagcagatgcaggctgccagcctgatcaagctctatatcatgggtgccgtatatgaagattatgacagtctttcctccaaatacagcaaggatcagctggacaatgcactgaactccatgatcacagtcagcgacaatgatgctgccaatacacttgtcaattatcttggcggcggggatgacgcagccggaatggcccgtgtgaataaattctgtcaggatcacggatacaccagcacttccatgggacgtcttcttcttgcagataattccaatggggataactacacttccgcaaaggattgtggaaaatttctgaagaccatctatcagatcgacaagggtactgctaccgataacaacgatactctggcaggagccgaatatatgtatcgtcttctgaaaatgcagaccaggaaaaacaagatcccggctcagatgccttccgaggtaaaggttgccaacaaaaccggtgaactggatcacgtagaaaacgatgtcggcatcatctatgacactgcaaaggggatcgacctggtagtctgctttatgtcacaggatcttaacgatacctctgctgcacagaacaccatcgcacaggacagccgtgcgatctatggatactataacgaataacaaaagaaaatatctttatattatattggtaaggaaaacatcatgaaccagacaaaagagaaaaaaacaagatacttattatggcctgcgctactgcttctgcttcttctgctggcgccgggcaacattgtccgtgtgcaggctgcctctgaccagactgctgtccagctgaaactcagtcagggtatccgccgctatgattatgcttaccaggtccttgatctggtaaatcaggaacgtgccaaaaagaaccggaatcctgtcactatggataagaaccttctggaatgcgccatgaccagagcagaagaactgaccgtttgcgccagtcatacccgtcccaatggttccatctgtttttcagcctttccttattttgagaatccaagtgaaaatcttgcgatcaaccagggaactcctgaagaagttatggaatcatggatcgaatcttccggacattacacgaacatcatgaattccaaaaatgtttctgccggaatcggctgctactcacagaacggtcatctctactggatccagtgcttttcttctcacgcaacagaagcctgcacacagcctgccaatcagactgtgtcacctgttatttccgtgcttccaaagctgataaatatccatttcaacgaagcttctccgatcacattcacagaagaacagaaaacactggctatctatataacctgtaatggattcagctatatgagttccagccttgacccagcttctttcacatggtcaaccggagatccttccattgccactgtggatcagagcggtgttatccgactgaaaagcagaggaaccactacggtttctgccacactgaaatcctgcccggacaaaacactgtctgcagatctcaatgcatactatgatctggaaaattccagagagacttctctgcgctatacaagttcctggaactataccggaagtcccattactttttctcctgaactaaaattccatggtcgtacgctgactgagggaaaagattatacgatttctttctccaacaatcagaacagcggtgtgggaactttcacgatcacaggtcttggcctttattccggaactctgacgaataatttcggtatctggcagatcaatctctctcaggcagagattgatttttcccagtcctcctatctgtataccggaactccactaactccgaagcccactgtcacctggaatggtataaccctgacagaaaatgtagattatacactctcctggcataacaatgcccagcagggaaacgcttatgttactgtttccggtaagggaaatttcaccggtgaaagtaataaatatttctacatcgaccttaccccgatcacggaagctgagattggtgatatcccggattatgaatatgctcctggcaaagaattcaagccggagccaacggtcacattaaatggtgttactttaaagaaagatgttgattataccctttcttattatgataacaccatggcaagttccagaaccaacagacctcgtgtccatataaccggtatcggcatttacagaagcggtttttccaaatacttcaccatcaatccactgaagctctccggtgagaccatccaactggcagattcaaactgcaaaagtgaaagtgtaacctcttatctgcgaaataacctggtcatcacctataatggcacacaactgacctctgatgattttcgcattacttctgtatactattcctccagcaatgagatcctggatttttcactttcctataagcagaattattccggttcaaggcatatgacatctgtaaagctttgcgatctttcggatattccggaacagatcttcaacggcaatgcagtaactccgaagcctactgtaaaatacggctcggacacgcttcaggaaggcacggattatatccttacctggaaagataacgccaaaaccggcactggctccgtaacggttacaggaatcaacaattatttttcaagtcagtccctgacctttaaaatatctgctccggcaccaacgagcactccaactccgaaacccactgctaccccaactccgaagcctactgccactccaacgccgaagcctactgctaccccaactccgaagcctactgctaccccgactccgaagcctactgccactccaacgccgaagcctactgctactccagttccgaagccatccactaccccggctccaataccatctggcactccggctcctgtgatcacgaaattaactgcaccgtcaattaaggcctctgcctcctggaacagctgtacgctccgctggaaccgtataaacaatgcccggaactatattctctacagaaaaacaaattccggaaaatacacaaagatcaaaactttaaacgcaaatactacttcatacaaagacacaaagatcactatcggaaataaatattcttacgtgatccgtgcaagcaaaaaaacatcctccggttatatttacagtccagtttccaaagcagtgactgtgaaaccgaatctgctccgtccgtccataaagcttaaaaccctcaaaggaaaacagaccctttcctggaaaaagatttccggagcaaccggctatgtcatctatcagaaaaaaggaaatggttccttcaaaaaagtaaaaactatttcttccaaaaataccagctatacatttaagacagcaaaaaatgttacatatagctacagactggttccataccgcacagtaaataagaaggtaaagaccggacctgcaagtgcggtaaaaaccggaaaagcaaaataacagacttaccggatcggacaaaaaaaaggatgatgcgtcaccgaaacgcatcatccttttttcagttcttttcttctccctcttcataggatttttcccagatctcggaaaatactgccagcggacagtctgtcagcaggcacatcagaagaaagcactcatatggattcactatgtagatctcactcatttcgcagcgggccaggatctcctggatctcctccaggaaatggcggtatctcgtatacggatcatcctctgccatctcctgagagatcacaaaaaactccagcgtgatcagatcaaaccgctccaccggaaatttatggttcaggatattgttgatcctctggcggctgaagcgcttctggctgaaatgctttgccagaatggatgcggacatctttttgagatttcccattttattaatggggatcccgctgcagataaccttttccagatccgaagcactgatattctcaggcttccagatctttttgccaccgttttcttcctcatcttcctgatacatggctgcaatgatcttccttgcccgctccagaaggatcataaattcctgaaaagcctggctcttctctgatttcggatcatcatgtcttcctttcagaaaagccagatattccagaagcttttcttcactgtccagacaaagccctgtgccatacacgatctctccggtctttttttccaccggagtcatctgtttgtaggtttctttatattcctccgctttataatagccaagatgattccggtaacaataccagtagatcacttcttccggattatgaaaatcaaaatcctgctcacgaagcacccgggtcagaaaatctgaaacatcctctgtactcatccgaagtccgaaccccagcagaaaaaccgtttcacgcttcacagatgcctgagtcagccagttattcaccagagaactcaacttggctgatgtaggtgacatggatttcggtgtgtaggtttccttgaaggattccacaacgatctccctgtagacttcctgcggcacctgggaaaaaggctcctcaagctctgcacgctcatacacatatcgtttcagatagtcaccaaaggaaaccagttccatctccttgtaaagataatgaaaaataacatctgcatcctcatcctcaaaagaatccagactgacaacctggcggaacttctgtgccgcctttcttgtaaattcaaagtccttcactgaatcgaaggcaactgtctgttcaaaatcaagatcctgcattcgatttctcatcgcaaattttctccttatcccttttcttactccccgggtttattaccgtccggtactgtggcgctctgcccagcgtttgagaatatttttttcttcatagccgctgatctgtgcaaggaccagtgtcacattatctctgccgcctctttccaatgcctgttccaggatcttacctactttttcttctgcggtttctgtcccgtcaaggatcttctgaagctcctgatcagaaagcatgtctgtcactccatctgaacagatcagatacgagcttcccggctgataaccgatctccacgatagaaggctccagtgccatgttttcttcctgaaagcccagatactgcgtcagcggagcttttcccagcatttttccgccgatcacatggtccgtggaaatctgctggaacttcccctgaaaatgacggtagatacggctatccccaaggttgcaggcatagattgccttttcgctgaaagacaaaagtgccatggttgttcccatgcttctgatacagttttcattgctatagcgacatactgcctcattcatattttcgcaggctcctgtcagaaaaaccacaggctcttttttcagggtctttttgttttcttcatagaagcctcccagcgcttccacagctgcagaagctgccatttcaccgtagctttctccgcccatgccgtcaaaaacagccagcattggaagctgccagtgctgtgtatgacctgccaggattccgtcaaccccctggttgtgcaccggcaggcgcactccgcagcaccagaaattatcctcattatttgtcctcacctttccggtgtgacatgtatacgcataatcaatctgataggccattctttttcctttcgtaaaaccccttcgacattactgctgaagctccactacagaattactccagtatttgtctcccagttctacatatttgtcgttatcgctctctttatcatgaaccttaccatctgcatcgatccatcggatcagaaggccgtcctgataataaaaatactgcttctcatctccgtcccatacataagtataaaacatctgctcgccccagtaaaaatattcctcataaacgccatctgcggaactgccgggatatacaagtactttggcgatctctcctgatccgttataaaagcgcaggcaatccccctctgtaccttcacgtctatagctgtccagagcattttctatggttgtcgcatggtcacgtatcgtttccattgcctgtgcgaaacttttatccgaattgtctgcagtaccgaaatttcctttgttcagagcatcagaatcatcggaatctgtatacgaaggttccccgttatccgcaggtttccgtatcgttcgtaccgcaaggatcccgccgatcaacacaacaaggatcccggctgttataagcattctgaaaatacctttccgtttccttctgtcatcgtcatttccgtcattctctggtacggatccttcccactcctggagattctggtcacggtcgtcttccagatctgtgatagaggtaactctgggctttacagctccggtttttcttataccgggatctgactgacgggaacgtcctgacggataaccggacaggctatccttttcggatgctgtttttccggatgcagatttctgaggcttctgtattgtgctctgagcctttggcgtattccgggctgcattttttgctatttctccggctgtcggtttctccggctgtatggataccggcacaggatttttacgtgcctgacggatcgcatccgtattcagctgactcgttcttgccagctgtctggctgcaccctcctggagaaacttcggcatggacttcggaacaggtctttcctccactggtttcggtttctcatgaactccctgttctctatttgccgctccataccggatttcttccagtgcttcccgaaacttatccggagtctgatatcgttcttttgcatcataagcacaggcttttaagataacggagccgaaagcctctcctgcatccacaggtggtggcggtgtttcgcctgacatcctcctcgtgagtgcgttttccttatctctgtatgtgatcagctgtttttcaagattcagaaacggaagcctgttatgattcatcagtttatataacaccaggccaagtgcataaatgtccactctgctgtcgtactgttctcccctgtacatctccggcgccatataggaataagttccctttttggaaagggtactcatggttttttccagttctctggcaattccaaagtcccccagcttgaaatccccgaacctggatacaaaaatattctcaggtttgatatccctgtggatgatgtgaagctgcccacagtattccagtgatctgcaaagatcgatacccagcttcatcacttctttttctgtgagattttttcccgcatagtattccatgaagcttgtgagatattccatgcggataaaaatatcccatccgatctcgtccagatattccatcaccttgtaatcttctacagatacaatatgggaatttccccggaaatactccatggtgcttacttcctgaatgcactcctccaccagattttcaaaataaccgcggacagatttttcatcaccggattctgagcgcacactgtccagctcccctttactggcggggattgtgattatcttaattgccgagtaaaaagaacgtcccttctcagttctctgagctttatacactcttccaaaagagccttccccgatcttgcttacgatcttccattccggccacggggaaattggcagttccttgtccatcgcaatccctcctctctcagaaaatccctgcttataaacagaaatctccctccggatttccggggggagatttatttatattagcaaggtatatcgacttattcttctaccggtgcagtttcctctgctgtctcttcaacagcaatggtctcttcctccggagcagtctcagtcttctcttcctctacggaaatttcctctgtatcctcaggctcctcggaagctgtttttacctccggcattcctgtgtcaagactgatctcactgtaacgcttcatacctgtacctgcaggaatcagcttaccgatgataacgttctctttcagaccgatcagcggatcgatcttacctttgatagcagcctctgtcaggacttttgttgtttcctggaaggatgctgctgacaggaaggagtttgtagcaagggatgctttggtaataccaagcataacctgttttccctctgccggctgtttgccctctgcctcaagtttctcgttaacttcctcaacatcaaggacatcaacaagtgttcctggcaggaactctgtatctccattatcctcgatacggatcttcttcagcatctgatgaacgataacctcgatatgcttatcgttgatctcaacaccctgcagacgatatacacgctgaacctcacggatcatgtaatcctgaactgcacgcacacccttgattctcaggatatcatgcggatttacactaccttctgtcagctcatcgccggcctcaagaacctgtccatcaaggactttgatacgagaaccgtatgggatcaggtaagtcttggaatcgcctgtctccggatcgtttacgatgatctcacgtttcttcttagtgtcgttgatcgtggcaacacctgggatctctgtgatgatcgcaagacccttcggctttcttgcctcaaaaagctcctcgacacgaggaagaccctgtgtgatatctccaccggcaacaccaccggtatggaaagtacgcatggtcagctgtgtacctggctcaccgatagactgtgctgcgatgataccaacagactcaccaacctgtaccggctcaccggtagccatgttcgcaccataacattttgcgcagacaccaaccttgcacttacaggaaaggatggtacggatcttcagtttgtcgatcggtccgcctgtctggttgcttacgccctctttcatgatacgggctgcacgcttcggtgtgatcatgtggtttgctttaacaaggatttctccgtctttattcttaacggtctcacaggagaaacgtcctgtgatacgctcctgaaggctctcgatctcttcttttccgtccatgaatccacgaacgaccataccggagatctctgctctgttctcacagcagtctgcctcacgaacgatcagatcctgggatacatcaacaagtcgtcttgtcaggtatccggaatcggctgtacgaagagcggtatcagaaagacctttacgagctccatgagcggacatgaagtactccagtacgtcaagaccttcacggaagtttgacttgatcgggagctcaatggtatgaccggttgtatcagccatcagtcctcgcattccggcaagctgtttgatctgcttatcggaaccacgggctccggagtcagccatcatgaagatgttgttgtacttatcaagacctgtaagaagtgcctttgtaagctcatcatcggtcttcttccaagtatcaacaacctctttgtaacgctcttcctctgtgataagaccacgtttgtagttctttgtgatacggtcaacagtatcctgagcctgcttgatcatctccggcttctgcggcggcacggtcatatcggaaatggatacggtcatggctgcacgtgtggagtatttgtaacccatagacttaacggagtcaagtacctcggctgtctttgttgcaccgtgagtattgataaccttttcaaggatctgcttcagctgtttcttacctacaaggaaatcaacctcaagaagcagttcgtttccaggtacgcttctgtccacaaatccaaggtcctgcggaaggatctcgttgaacaggaaacgtcccagtgtggactgaacattgccgcttaaaacagttccgtccggcattgtcttatgacaatggacaatgatctttgtctggagtgtgatgaccttgttctcatatgcaagaattgcctcgttgacactcttaaagaacttgccctcacccttgtttccaggtctttcctgtgtcaggtagtagataccaaggaccatatcctgtgaaggaacggctacagggccaccatctgacggtttcagaaggttgttcggtgataacagaaggaaacggcactctgcctgtgcttcctgggaaagtggaagatgcacggccatctggtcaccatcgaagtctgcgttgaacgcggtacaaacaagcggatgaagcttgatcgccttaccttctacaaggatcggctcgaatgcctggatacccagacgatgcagtgtaggtgcacggttcagcataaccggatgctccttaatgacgtcctcaaggacatcccatactgccggctcaagcttctctaccattttcttggcatttttgatgttgtgggaagttccgttggcaacaagctctttcataacgaaaggtttgaacagctcgatagccatctctttcggaagaccacactgatagatcttcagttcaggtcctacgacgattacagaacgtccggaatagtcaactcgtttaccgagaaggttctgacggaaacgtccggatttacccttcagcatatcggaaagggatttcagagctctgtttccagggcctgttacaggacgtccacggcgtccgttatcgatcagggcatctacagcctcctgcagcatacgcttctcgttgcggacaatgatatccggagcaccaagctccagaagtcttttcagacggttgtttctgttgatgatccttctgtaaagatcattcaggtcagatgttgcaaaacgtcctccgtccagctgtaccataggacgaagatccggcgggataaccgggataacggtcatgatcatccactcaggacggttgccggactcacggaaggactccacaacctcaagacgtttgatgatccttgcacgtttctggcctgttgcatccacaagctctgccttcagttcttcagaatctttttcaagatcgatagcctgaaggagctccatgatggactcggcacccatacctacacggaatccttctccgtaagactcacgtgcttcctggtactcacgctcggtgagtacctgtttgtacataagtccggaatctgcaggatccagaacgatatagttagcaaagtaaagcactttctccagtgttctcggagaaatatcaaggatcagacccatacgggacggaattcctttaaagtaccagatatgagacaccggagctgcaagctcgatgtgtcccatacgctctctacgaacggcagatttggttacttcaacaccgcatctgtcgcagacaacgcctttatagcgaatttttttgtactttccacagtggcactcccagtccttgctcggtccgaaaatcctttcacagaaaagaccatccttctcaggcttcaaggttctgtagttgatcgtttcaggttttaaaacctcaccgtgtgaccactctctgatcttctcaggggacgccagtccgatcttgatggcatcgaaagtcattggctgatatgtttcattggcgttggttgtttctgccatgtattctttcccctttcttattcctcatcatcaaaggactcttcaaactcgatcatatcatcttcgtcttccatgtcctcatcttcttctacattgacaagctcttctccgctgaactcctgcttggtgtagccgtgtttaccgaaggactcctcatctctgcgtcctctggaatcgccctcgatgacatgacgaagatcagtatctccgtaatcagaggtttccataatgtgtacctctgatccgtcctcgctgagcacacgtacatccagaccaagagactgaagctctttaagaagtaccttaaaggactcaggaatacctggctcaggaatgttgtcacctttgatgatcgcttcataggtcttaacacgtccgatcacatcatcagacttcactgtcaggatctcctgcagtgtgtaggaagcaccatatgcctccagtgcccaaacctccatctctccgaaacgctgtccaccgaactgagctttaccacccagaggctgctgtgttaccagggagtatggacccgtggaacgtgcatggatcttatcatctaccagatgatgcagcttcaggtagtgcatgtgaccgatcgttacagggctgtcgaagtactcgcctgttcgtccgtcacgaagtcttaccttaccatctctggagatcggaacgcccttccagagtgctctgtgagctttattctcatcgagatactgcataacatccggtgcaaggatgtctttatatttctcacggaattcctcaaagtcttccgtattaacgtaatcgttggcaagctccagagtatcctggatatcaacctcgtttgcgccatcgaatacaggtgttgcaatattgaagccaagtgctttggcagcaaggctcaagtggatctccaggacctgtccgatgttcattcgggaaggtacacccagaggattcagcacgatatcaagaggacgtccgtttggaaggaatggcatatcctcaaccggaagtacacgggaaacgacacccttgttaccatgacgaccagccatcttatcaccaacggagatctttctcttctgtgcaatataaatacgtactgcctgatttactccagggctcagctcatcgccgttctctcttgtaaataccttggcatctacgataataccatactcaccgtgcggtaccttaagggaagtatcacgtacctctcttgccttctcaccgaagatagcacgaaggagacgctcctcagcagtaagctcagtctctcccttaggagtaaccttaccgacaaggatatcaccggcacgtacctcagcaccgatacggatgataccgcgctcatccagatccttcagagcgtcatcgccgacacccggaacgtcacgtgtgatctcttccggtcccagcttggtatcacgggattctgcctcatattcctcaatatggacagatgtataaacatcattctgtaccagtttctcactaagaagaacagcatcctcgtagttataaccctcccaggtcataaatccgatcagcgggttcttaccaagtgcaagctcaccattggatgtagacgggccatccgcgataacctgtcctgcctcaacatgctcaccttggaacacgatcggtctctggttgtagcagttgctctggttgcttcgcatgaatttagtcagatgataatcatcttttgttccgtcatcattcttgatagagatatctgtagatgtggaacgaagtactgtacctgcttttcttgcaacaacgcatacaccggagtcaacagctgtcttggtctccatacctgtaccaacaaccggagcctctgttgtaagaagcggaacggcctgacgctgcatgttggatcccatcagcgcacggttcgcatcatcgttctgcaggaacggaatcagggctgtagcaacggagaataccattcgcggagatacatccatgtaatcgaacatgtgctgctcgtactcctgtgtctcctcgcggtaacgaccggaaacgttcttatgaatgaagtgtccctcttcatccagcggctcattcgcctgtgctacatggtaattatcttcctcatccgctgtcatgtatacaacctcatcggttacacgcgggttggaaggatctgttttgtcgatctttctgtacggagcctctacgaagccgtactgattgatccttgcataggatgcaagggagttgataagaccgatgttcggtccctcaggagtctcgatcgggcacattcttccatagtgggaataatgtacgtctcgaacctcgaatccggctctgtctcgtgacagaccgccaggtcccagtgcggaaagtcttctcttgtgagtcagctctccaagcgggttgttctgatccatgaactgtgacagctgggatgatccgaagaactcttttactgctgcagttacaggtttgatattgatcagggactgcggagaaatactctctgtgtcctgtgttgtcattctctcacgtaccacacgctcaagtctggaaagaccgatgcggtactgattctgaagcaactcaccgacagcacggatacgacggttgcccaggtggtcgatatcatcatcgttaccaaggccatactccagatgcatattgtagttaatggacgcaaggatatcttccttggtgatgtgtttcgggatcaggtcgtggatatcacgtttgatcgcatcacatctgtcctcaaatgtgtcattttcttccagaattttttcgagcactgggtagtatactaattctgtaacacccagggacttcggatcctcaagctccggcagatagtgacggatatcaaccataaggctagaaagaactttgatctctctctcctcaccctggatccatacgtacggaactgcggaattctgtaatgtatcagcaagctcttttgtaacaagtgtctcagcctcagcaaggatctcacctgttgttgtatctacaacatcctgggaaagcttgtggcctacgatacgtttattgaaatgaagcttcttattaaatttataacgtccgactttggcaaggtcatatcttctcggatcgaagaacattgccatgatcaggctctctgcgctctctactgcaagcggctcgcccggacggatcttcttatacagctcaaggagaccttcctgatagtttgtggaggtatcctttgtaaagctggcaaggatctttggctcttcaccaaacagatcgatgatctcagcattggttccaatgcccagtgcacggatcagaacagtgatcggaacctttcttgttctgtctacacgtacataaaatacatcatttgaatctgtctcgtactccagccatgcacctctgttcggaattacagtactggaaaacagtctcttaccaagcttatcatgagcgatcgcgtagtagattccaggggaacgtactaactggctgacaataacacgctcagcaccattgataacaaaggtacccgtagctgtcatcagcggtaaatctcccatgaaaatctcgtgttcgttgatctcttctgtttccttattgatcagccttactcgaaccttcaaaggtgcggcataagtcacgtcacgttctttacactgctcgatggaatattttgcatctttttcatcgtatgtgaaatcgatgaattccagactgagctttccgccgtaatctgcgatcggagaaatatcatcaaatacttcttttaaaccttcgtcaagaaaccactggtaggaatctttctgaacttcgatcaggtttggcatttccaggacttctttttgtctctggtagctcatacgcatgctttttccagtttttacagaacgaattctgtttttttccattgacgtttcacccctgtttttttattatttattacaacatgatcccgcctgacctttaggcaggcatatctagccataatatagcatcctccactttaacataagaaaaaaagtgtgtcaagcactttttttgatttttttacatttttcaaaaaaaagattctgttccttctatacatacgatgtatggatatccggaacagaatctttttttatcacacatacttacttcacaatagtatttactgttactgtatttccgtatttatcttttgagacaagtttcagagcagtattctttttttgcttctttattttaataacgtactgtttctttttgtttacggatgatacacccagctttgtctgttttccggaacgctgcacatatgcaataacagtctggctgcctgatgcagttccgcttatagctgtacttcttgatgtaacagttctgcatgaaggacggttgatgccggtccatcctttgcagctttttacatataccgcctgaacctttccgttttcgcaaaatgtattctttttcatgaccggtattacagatgcatatgcataaacaccattccccctatttttctccgcacggtttcctgatacttcggatacttttgatttccagagcaaaataccactttttgcatttgatgtcacacgattgctttttaccctgactccgccggccacatactcaattttcacgccatgatttttgttggataaacagatattaccaagaacattattgttctttcctgcatttacacgtattcccgagccggccgctgatttaacagtattcttctgtgcagtggatgaagtatttacagattgcagataaattccatctccgcctgctccggaaacagtattctgctctacaagatttctctgttctgatcctgctgcatagacagaaccggagagataaattcccgtatttgcagttccggacactgtattcctgctgataacgcttcctctggaatcctgggcataaatcccaaaattggaatatgaagaagtttttttcattgttacctgattatctgttacggtatctgtgtcagtaagagacatgctgattccgtttccatatccgctgatctgattatcttctacagtcacacctttcaccggatatatctttttagggagcacagctccatcttttttcatattatagcctgaaacttttataccactgcagatccatgcaattccaccaatgctggtagttctggcaagactgatgtagtttcctgccacacgaagattcctgtttttcagcatgtccggcccatcatcatagcctggcgtctggtgtgtattgctgctcacagaagaaatgtccactccatttcccacatttaccatggtattattttctgctgtagaatcttcataattcataaaccttatacagcgtttttttacattatggaaagtattattcgtaactgtgatccttttatatgtttttccggacatcatactgtgcgttcccagccctgtaaagacatcttcgaacacatttccatcgatcacaaaatcttcacaggtcgttccatcataaggtctgtactgcggaaaaacattgctctcatctgtacagcagtcgatctgaatacattcctgtccaccttccacataattcttataatagccactgaatgtacagcctgtgatcttggcatttttcactccgccaaattccagaaaatgagatttcagattattaagaaatgtagcatttttaatcgtaacattcgtagcatgtccaatgcaaaatcccacaaatccgcctggtgcatccttattttccacacactgataattgtagtcccaggttcctccatcgatcacaatgttgcgatatccattatatccgccttctgaatctttggtatttccaagacggaggatcagatgtttggtggtagacgtttttgtaatattagcgtctcttgcatataagtacatattactgtacatgcaaagtgtacctgtcagttcataatttcccggtggaattatgatcttgcagggattttcatctgtggcctgatctttcaattcaagaaacagtgtgttcaagggtgctgtgatatcctgtccttcctcaacttccagagtcacagtctgataagttccaagttctccatctgaagcatctcctgcagaaaaatccccagcagcattggcatcatctgtaaaatcagtctgtgcctgacctgcgccttcatcagcttcattattatccggctctgcgactttttctacattaccgttttcctgctgaagctgaagttcttcggaaccgttatcgccgttctccgttccttcggaaaaatctgccggcaattctccgctgatactgccatctgctgtctgaatatcctcactgccagcttccgttgctgcattgtcagaaatattcttatttgtgtcaaaatctccatctgtgcttccatctgaaaatgcgtcttcagttgaattttccgatatttcctcatcccccggtgcctctgatacatccactgcttctacagcacctgactctatttttgtccaggatgcctgtgatgcaggaaccacactgccatcgttatccagcacaagcggatccagatcctgttccggcatattttcctcttcttcaagctcctcctgctgctgcattgcagcttcctgagcccgaagttcatccagaggatttttcacgtttacagttatattttttacattttttccgacagacactgtcttggctgccgtcggaaaagaaactcctgtgattcccaacgcagcagcaaggatacaggccattatttttcgtttcatattccatccaccctttcctatctcctttattatcctttctttttcttcaaaaagcaagatttaccctggatttttcactaaaaaaggctgctgtgccgccggtaaaccggcaggcacaacagcctttaaaacttctgatctgatcggattatttaagtgtaaccttagctccctcagcctcaagtttagttttgatgtcctcagcctcagctttggatgcgccctctttaacaaccttcggagcaccatcaacgatagctttagcctctttaagtccaagacctgtaacctcacgaacaactttgataactttaactttgttagcgccaacctctgtaagctctacgtcaaactcatctttctcctcagctgcctcgcctgctgcacctgctgctgctacaacaacacctgctgctgcggaaacgccgaactcttcctcacaagcttttacaaggtcatttaactctaatacagataattctttgattgctgcaataaattcttctgttgttaattttgccattttaatttccctccatttataaattttaattaataatcatgcggtcgttatgccgccaattgcacgttgctgggattactcagcagctgctgcgtcagctccgccgttctgctctgcgatctgattaagcacacgagcgaagtttgcgatcggagactgcatgcttccaagcagttttccaagaagttcctctcttgaaggaattgtggacagtgcctgaattccggcctgatcattgtagttaccttcaactacacctgcgatcagctccagtgccgggaactgttttgcatatttagcaaggattcttgccggagcagttgcgtctgtctcggagatagcgatcgcatttgtgccatgtaaatgatcactgaggctctcaaatgctgtaccctcgaatgcacgacgcatcatggtatttttgtataccttgtactgaacaccagcttctcttaactctttacgaagaattgtatcctgctcaactgtaagaccgctgtagtttacaagtacaacagactgtgcgtctttaatgctgttagagatctcttctacgattggttgtttcagttctacttttgccatgaaatggtacacctccttatagattttgtataccgccgtcgcaataagtcaatctgtttaaaaaaaagaccttactgcttcgcaataaggccttgtgtaatcttaactcagaatacttggacctcggtaggcgttttgatccttatgccttacggcacctactgtcttcggcagcgttcttaggtacaataccataacagtgccgggtgtgtcaagtatttttttaagattttttcaaaattatttagtaccaaaaatacgatctccggcatctccaagtcccgggcagatataagcgttctcattgagttctctgtcaagggagccgcagtagatctgtacatccggatgcgcctcatggagacgtttcagtccctccggagctgcgatgatgcacataaacttgatattctttccgccctgtttcttgacaaaatcaatggcagcctcggcagaaccgccggttgcaagcatcggatcaacgatcaccgaaatacgctcgtcgatagactccggaagcttgcagtagtactcatggggctcatgagttaccggatcacggtaaagtcccacatgtccgacctttgcagacggtaccagtgtgagaatactgtttaccattccaagtcctgcacggaggaccgggatcaccgccagcttcttgcctgagatcatcggtgtcttacaggtttctatcggtgtctcgatttccacttcctctgtaggaagatcacgaagtgcctcatatcccatcaggattccgatctcctccaccagcttacggaactcgtttgttcctgtgcttttgtcacggagcattgagattttgtgtttgatcagcgggtgatccataatataaacattttccattttttccatcgtgatttcctctctttatctgtgttttttgtaaagcgaaccttctcattccactctgcttcatacacaggaacgcaatcctttcgcttttctgtattcttctttctacattataatatatatgacactttttcaaaagggggaaaaactatttttcctggtgttccaggacctgatcgatagcataggccacaccaaactcattgttgctctttgtgatgtattttgctgcctttttgatctccggaactgcgttttccattgcaacggttgctccgaaatccatggagatcatggaataatcattaaggctgtcaccaagaaccattacctcatccatggtatatcccaaagcttcaatatattccttcagaaccgggcctttctgtgcctctactgctgtaacctcctgattatatataaaggaagaagctaccgcaacagccggattcgctctcagttcatcgctgagtttctcaagctgctccacatctgccgcaaaaatgaagatcttatatatcggcgcaccgctgctctccagggaacggatatcggaaatccctttcgtgtttccggcgattctgcggtactgcggggatttccgtacaatctcctcgctggtatctatgtccatattgaaaagacggatctgctgaatgatcccgtcttcaatttccttctttgttccaatacggtaatcatagcgatccgtaaaaaatgctacagataccgggtatttttttgccgtattgtagacctcctcacacagctcaatagagatcggtgtactctttacaacctcctgctgcggattccgtacttcagcaccgctgctcaccacataatcacaggtcagctctgttcccttcagttcctccatggcaccggggaaattccggccggtggcaaccataaagcggattcccgcatcgcaggcacgcctgaccgccgcaagggtttccggtgcgattctatggtcatcaccaagaagtgtgccatccatatcacttgcaattacttttatcatgaaaaatttctccttttatctgtaaaaattccggtcaatcattcggatccatagcaaatatgtccttttttcggagaaattatatcttatattattgcaaaatacaatgatttttgcgacaggcatatgcctttctgatttcagaaatacatggtataatgagatttcataaatctgtccgatgtcggtcaagcgtatatccgcaatccgcgtcgctgcttgatccggttaagtgaataaccccatccacatgtactacatagatttgcatcaaataaatgctcttcagttaagtcagtcaatcagaaaacaggagaatattatgtcaacttatttttttcattccaaaagaagccgctcgcattcccgtttcttctatttaatattgtgcacagtccttgtctgtccaatactccttttcacaggctgcggaaatatcacggatgcagatacatccaccaccggaaatgagcctatcagtatcagcagtatcaaattgaatacagctgtacagatcacaatttacgattctcaggataaagctctcctggatgactgtctggcactgtgcgataaatatgagctgatcttcagccggacaaatgagaaaagcgagctttataaattaaatcaccgcaaagatacatcggataaagataccaataccgaccggcagactactccatatccggtcagcggcacagcagacacctggcatatatctgaagaccttgccgctctgctttctgaaggactcgatatcaccagggaatccgacggtgcctttgacatcgccattgcgcctttgacctctctctgggatttcacagcagaagacccgaaggctccggatgatgcagatattcagaaagttctccccctgtgcagctccgacggcgtcaccattgacgggcaggatatcacacttccctctgatgacatccagttcgatgtaggcgccattgccaaaggctatattgcagaccgcctgaaagattttctggtaaaaaaaggcgtaaacagtgctatcatcaaccttggcggcaatgtcctctgcatcggctcaaagcccaacggcactcccttcaagatcggcatccagaagccttttgcagatcgcaacgaaaccgaagccgttatggatatcaccggaaaatctgttgtatcctccggaatttatgagaggtgctttaagcagggcggtaaattatatcatcatatcctgaatccccaaaccggctatccttatgaaaacggcctgatttctgtgacgatcatctccgaccagtctgtggacggcgatgccttaagcaccacctgtttcgcccttggtctggaggacggactgaaatttgcggagaaaaaaggcgtgcaggctgtatttatcacagaagattatgaactgcattatacggacggattccaggatgagatcaatgtcactgatgtggaatcctgaaccatgaaatctttttcagtaacaaccaaaaaccttacggatagaccatatttgtcacataagtctgcggataatctttcagaagatttgccattgctgtctgtgtctgtgtcgttgaaaatggctaggatgggccgttccacagacattcataatctgcctccgtaccgtggatgtctctgttccgcagttgtagggccacagggggggggaggcaaaaccttccggattcacaatctgctcccaagcttcttcatatcccttatccggaagttcaaaacaccatgggataaatccgagcaaacagtgatcttctggaagcagataatgccgaagatggcctgaagatcattctcaaagagcatcctgacattattatcacagatatgaaaatgcccgtcatggacggaatacagctctaaaaaaagccggaagaacttcacatcgacagcaaaatcagtgtgatcagcggattcagcgatttcaaatatacaagacttgcgatccaggctggtgttattgattacatactgaagcctgttgatccccagaatttgaacaatgcgctttcagccacaatttctcagttggaaagtgaagcaggcaaaactgggacttccgattctgcttcatcacccgaactctgctctgcattcaccagtagggtaatcagtgatgtttttgattatatcaatgcacattatctggaaaatatctccctggccgatattgcagaatcttttttctaagtaaggagcatctgtccagattgttttaaaaaaacgtcagaatcttttttcctatactatgcagttaaagctcaccgaggtgaaacggcttctgcagtctacggatataactctcgacgacattgcctggcatcttggtttcagcaatggaaattacttcagcaaggtttttaaaaagaactgtcagatgtctcccagtgaatacctgaacgtacagctatagttcttcagaaaacttttctccgataaaaagtagctgtaactgagcgtattcgttcagttacagccactttattcaatattattatattcagttattgatcatatccggccaggaaagaatctctgcagaaatcttctcttcataatctccgtcaatgtcctcacttcttccagccgcataaatattggtctcggcaccccaaccgttgtcctcgtattcccatacatggaatttcagtccacggaacatgaaatccagacttccgcaaccatcttcctctgtgtattcgaatgtgatattttttttgttcagagcatcctgtactttctgtaaacgcatataatatcgctccttccacgcctaaaatcttcctttatacacaaagtataacatgttgtgatttttgacacaagtcaaggatgaaagtgcctgtgagctgcagatagctcaggcccagtagagtctcattccaaactcatggctcatacggtccggatgcccatcaactcttgaaagcaaagtacagatatcctgataggtattctttgccatacatttaccgctattatcagaaagaattagtgtaaggttccacttcttgccttttccgtattctttctcaaaggtttttaccatgacacggctgtctgccggaacttctgctttaacacttcccttttccaccagttctccgttcaatgtttctgtaatgatccatgtaagttcacactctcccagagctccatctgtatcatttacaatatacagactgtccagataatctttgtgctttgcaaaagcacccactggtgcgttgctttccagtatagcctgaagaccctttttgggaattccccaccagtcatataatccgtagaagctctgaggacacagatcgataaacataaactgtatatatcctgagcaaggttcatatttctggatcctgtaatgctctgtataatatttcagaagcttatactgatattcctggatcttcgggatatcatccaccagtttttccagacgatgatataccgccggaacagttttcagattttcactgctgcccggtgcatcaaatccgtactctgtattcagcttttctgtctgctcataaatatctgcatattctccaccgcataaagaacccagataattatggctgtccccgctaagcagatcgtcttcgcagaaagaacccttgatgatcggtctgcccggatccatcttctgtacttccctgtacaaagcaggtcccggattttcctccataaatctccttctcacatttccatccggatcaatacatcccggttcattcataatgatccagcagatcagagacggatgatgcttcagaagtttcacattttctctgtaaacatctgcaaatctctgcgcccattcatctgttgaaggatgcgtccagttgtactccgaatcctgaaaaactgcaattcccagctcgtcacacagatcataaaaaacttcctgctctgtgtggacatgtactcgtaccagattaaaacctgccgcctttacattaagaagatctctcaggtaccgttcctttgtcattgcagaaatataacaatccggaaaataagaggttcctcttatatacagtttcctgttattaagccagaatcttgttattttttcattacgctcaatctgaatgtcccgaaaagcaaaattcgttgttctgctgctcagtatgtcttttcccctgcttaacgtaagttctgcctgatacatccagggataaccatgatcccatgtggaccacagtctgacatcttccactttaagctcacatttaaaacctgtctctgctttctctgccattatctgaacagttttttctgcctttataagaccggactctttttcccggatctttacattaaaatcatatgtctccccggatttcagacctcgcgcttcagtttccacatatacgtctgctttccttacatccggatccagttcatacttcagatctgtctgatcttccagaacaccttcttctgtcaggatcagttccacttttccgtagattcctacaggatttacatctctctggataaatgtatcagaatgttcgtaggtaccttttaccatatttctttttaccaggtgggttctggaatcctgtgcatccagctccacctcatcatcccatggagaacttacctttacaatgagataatttttctctccaaaaacaagcttatcttttacattaaaggaaaatggagcggaatatccttcatgctctccaagaaattctccgttaatccatacttttccataataatcaacattggtaaatttaaggacagcatccgtaactttctgatccggaacttcaaactctgttttgtaccaccagggcgcctgattgaaatatctcagttcacgcccgaaatatggctgtctggcatagataagctgcagatgtttcagttcctccagttcctcccattcagacacctgggaacctacggaagtatccgcttccctggcagcataaagcccggtcttttcccctgtatcatgaacatcctgcaaaattttccatccttgtttcaattcaatccttgtttccatttcagcctcctaactcttgaccgcacctgcagccataccttcgattatgtttttgttaagaataaaatacacgatcagtgtaggcaggatcgatattacgatcgccgcaaatgtacttccccagtccactcttccgaactgccccacaaagtcattcaggccaattggcagagttttcatatcagaagatgagataaatgtattggcatatgtaaattcgttccatacaaaaacaaaattgtatgtaagaactgtcattgtagtatttttagccataggtaccacgatcttgcggaatgtggttcccattgtggcaccgtcaataactgctgcttccagaagagaatccggcataaatttaaaaaatccggtgtaaagatagatacacattggaagtccgaacccgatctgcggaagcaccagtgcccagtatgtatttctcagtccgatcctgttataaatctggaacatgggtataaggcaggaaaaaataggcaccatcattccaaacaggaaaaatgccatcagtgcattggcatattttacctttaccttgctgatcacaaatgcaaccgggcatcccaggactacgatgccaagaagtgtgagaactgccacaaccgtactgttaagaaaatatcttggaatggatgagatcgtcagtgcgctgatatagtttccaagataaaatcctgatggcagggcatactgtgcagtatatgtcatttcatccggtgttttcagactggagcagataacccagaaaatagggtagacctgtatcatgacaaaaataaggatcactacatagaacacagcacgaataggtatattttttcttgattttatcattctgacccatctcctttcgccgatcccaggcatttctgtataatccctactgctaccagacattcaatgaccagaaaaacggacaatgtacttccatagccaaagtcagccgaattaaaagcggttttatacatataagttgccaccatctctgttgatctggatttattgtcaagaatatagaatacatcaaaggttttcagacaaccatttacaagcattacaatgacaatgctgaatatatttttcaccagtggaagctttatgtaacgatactgttgaaaaacattgcagccatccattgtagatgcctcgatcacatcctttgatatggatacaaatgcggaataaaaaatgatcatgtacagaccacagtatttatatccatcgatcagggttatggtaatcagcgctgtatgggaatttgccagcaaagcgataggttccattcccagtttttccatcacatagcaaaccaggccctggggctggacagaaagcattttggaaaaaatctggcagatcgccatagatgaaatgatacatggaataaaataaataacccgcagaatatttccacctttggaaatatgtgtaagcaaaattgccaggatcagtcctgcacataactggaacaaacttcccaatacaacaaatttaagattatttacaacagcctcacgaaatgtctcatcctgaaacatcctcacataattttccagtccgataaacttcatatcaccgattccattccaggaaaaaaggctgtaacccattgaccacagaattgggatgataacagtaagaatatatacgaacagtgcaggaagaacaaacggtaaaggctggattttatttctgggcttcatatcctctcccctttcatacgcagatgcagataaaattccgcatctgcgtattctctcagttattcttcagtgtcaaaataatcagatgcatactgttctacagctttgtccatgttttcgcagaactcttcaggagttgattctcccattccaaggcttgccaactcttttctgtaaacctcgtttgtagaaggatccagacgaacatcccagcactgggcaaaagtgccgcagttctcaagatcacttaaaatctgctgtgtaagctccggaagcttctccgaatcacttggcatcatggatggaagcatattgaactcatacattgccgtatcagcaaaattatcccatacataactgatgaaatctttcatctcatcactcatggaatccttgagaatggcagttccgattccacaattcgcatagtaatcattttctcctgtagcggttccttcgctgtctacaggaagtttgaacatggaaatgtcatctttaagatttccctcatcatctacaagatccggtgtatcccatgttccggtgtataacattgccgcaccactgttcagaaacagatccatctgtgcggtagtatctgaacttgtccatccttcactgaaatactgggctatatcctgtgtatactgggctgttgcgatacctgtctcagaattaaatttttcttttcccattcttgcattgtcaatgaagtcatttccttccagtctgaaagccttaaatgcaggataacgcatgatcatgtcgtaatttcctgcggatatcggggtcattcccgcatctttcagcttcttgcacacatccaggaggtcttccagtgtctgaggtgtttcagtaattccggctttttcaaacatgtctttgtgataccagaaatactctacatttccctgccaggtcataaggtaattgcttccgtcactgagtttcggataattcagtgcaatatcaaagaacttgtctttgatacccagttcatcataaaggtcatccacactgtagatcagatcctttttgcaaagtccttcaaaaaatgcctccggatctgcgtcaaaccagtccggcagttcattgctggatgcaaggatcttgatcttctgaagatatgtttctctgtctgcaatagactctacattgaattcaaaatccgggtgatcttttttataatcttctgcaagcttcttcaatgttttcagtgccgcatctgtttcgcccctggcactgatataattgatcacaagtggttcggaatcctcttttttatctgcccacacattcatcatgctgaatgaagagagacacatcattgtggcaagtgtagcagccatcactttttttaatttcattttcgtcctccttttggtacatttctattcatccggattgaatattttgttccgctttccttatcgatgagaccattatattaaatccgtccggaaaaatacatggaaaatcttcgctgtacctggaatattttctccaatctttcccccacacttgtgagaatttttcccttattatataatgtagccaataaaaccagaggggggattccatgatagaaaatctgaaaaaaaaggtgtttcacttatttttaggaatcagtctgaaacgcaggctttttattacatatctgctgctcagttctctgatactcatgcttacttccgtgtttttttatactgcatccaaaaaagtactgatcaagcgtgccgcactttccagtcagcagcagctatccctgatcaccagcaaccttggagaaaagatcgataatatatcaaactatgccatcaccctttccatcaacagcaatatcgccgatgttttaaaagaaaatcccacagttcccgaaaacacactggaacattttctggtaaattccgagcttacagaccaggcccagcgtatcatcggacttcacaaaaacatctatgcctgggatatcctggatacagaaaaccactggtttcacagcagtaccacagaaacagatcagcttgattccattttaggtcccgaagtccttgacagccttcagactaatctggcctttcagtttctcggacccttccagataagtggggagccaacctttgtagccttaaaaagtattacaaacattgataacaccaaatatctgggcgccctggtccttctgatcagagaaacaaatatttcctctgcattccgcgaccttccggacagctcttccagggatttctatattactgatgaaaatggacagatactttcctcttcttcatccggaggtatttataaagacttctcatcctatacaaaaatcagttcagagaattataaaaccctgacagaaaccgacaggcagtttttttccgtagacggcactgacactctttttatctgcaaatcctatcctgacctaaactggaatgtgatcaacctgattcctctggaaagcctgactctggatcatatggtgatcctgcacaacattcttctgatcagcattgtagtgtttattttatctgtatttttttccatattatgtacaggtactgtcaccgcacctatacagaaacttgtggaaaaaatgaaatctgcatctgccggaaagctgaatatttctgccagttactcttcaaatgatgaacttgcagttctctataaccagtttaaccttatgatgcagaagatccagacattacttaacgatatctatgaggaacaaaatgccaaacagaaaatggaaatacgtcttttacagtcccagatcaatccccattttctttataatactttaaacaccatcaagtctctcatagaaattgatatgaatgataccgcagtaaaagcagtgtctgccatgtcatctttctacagaaactctctttcaaagggacagtttatcattcctctgcgccaggagctgcttcttacagaacagtatctttatatccagaatctgcggtatatggattttgttgattacgagatcatctatgagccgtcctgggaggatcatggggcagagatacccaagctgaccatacagcctgttgtggaaaatatttttgtccacggacttaccagccagatatgccatattcacttaattgtttctatcaaaaatggtaccatctgtatttctgtttctgataatggttccggtatcccgccggaaaaacttgccgaacttaaccgttctatcagagacttcaaaactgcccgacattctttcgggcttccaagtatcaaccacaggattgctcttctctacggtgagaattacggacttaccatcgaaagttcacctgaaaagggaaccactgtaaccatagtaatacctgacaaaaatctgatcgagggggaaatataaagtgaaaacacttgtaattattgacgacgaagtttttttcagaaaatctctgatcaattttcttgaaaaacaaaacctttataacattgcaggggaagctaataacggacaggccggaatccggcttattgaaaatgttaaacccgatattgcccttgtggatatatccatgccggttatgagcggtctggatatgatcgcagctcttggaacagactgtcataccaggttcatcctttccacaggatacgaagattttgactatgccaaaaaagccatctctcttcaggtccgcggatacctcctgaagccattggatcaccgggagcttatggagacactccagaaagtaagtgacgagatcgatcaggaaaattccagaaacagttatgtgaataattattttcagttccgcgatctgtatacacggcaaatgcagcttaatttcttccagaaggtgatcagcggaacaaccatttccccggatgatctggaaaaaattccgattcataaaacttccgattatcttaccattcttatggagatccacaatgccaatccggaaatatgggatgaaaaaggtgatttttctctgctccacaccatcctggaaaatatatgcagggaaatcttacagcctgtgtgcaaagagcttatttacattgactattctcagatgagacagtatatcatcatggaaaaaagctctgatttttcttttaccgatctggaacaatcctgtctcagacttgccgggatatatgataatatcgcacagatttccacttttttctgctgtggaacacctcatgaaggcgtggaaggaatccgctattcctatgaagaggctctttctgtttttcataacagaactgcgtcttcttccggatttctttatttcacgccccagtcccattccggtgattttacattaaagcctctggtttataatgatatcctgatctttctgcgccagcaaaattcaccggctctctgtaaatatattgatgaatatttcaacgatatcatcaccaaaaaaatccatatccggcagacctggagtgtagctgctgcttttcttactgtacttgacggttttatcacggagtgcagtcagcgtgaaacgctttttcctcttctggaaaacgccctgaatacttaccagaactgccagagtgccctgcagttaaaacaactgctccagtctacctgcaaggcagttctggattctcttgctgatgaaaaaaatccgcggaagtcagctcttgtatcccaggttcaggaatatatctgtctgaattttaatcagccggatcttcgtcttgaaaccattgcttcccatttttttgtcaatccccagcatctctctgctgtattcagtcaggaatccggagttacacttacctcatatatcaatgtctgccgcatgaaaaaagccagacagtttcttctggaagacagcccttccattcaaaatgtagcttctttatgcggattttctgattccggatatttcagcaaatgtttccggaaatattacggaatctctccaaaaaactttgtatccctgactgaaaagaacagttatccaggttctatcggcatatgatctttatctcattaaagcgtaacgtttcaccgcttcatcttattaaaattacattttactctaacatatgttttatgtaaaatgcaagttctttttattgtgcaatatcccggaatgtgttaagataaaacctgcgactttatacaaatagcagtttaccatactgcaataatgaggtgagttatgaaagaaagagaaaaacttggatcccgtctgggattcattctgatttctgctggctgtgccataggaatcggaaacgtctggaaattcccttacatggccggacagggcggtggcggcacattcgtactgttttacctgatcttcctggcccttcttggacttcctgttatgactatggagttttctgttggacgtgccagccagaagagtcctgtcaaagcatattacgcactggaaaaaccaggacagaaatggcacatccatggatatatcactctgatcggatgttatctcctgatgatgttttacaccactgttacaggctggatgctgaattacttctatatgacagccaccggtaaattccagggacttgattccgacggtgttgcaggacagtttaccaacatgcttggccagcccgttactatgggattctggatgatcgttgttgttattgcaggtgtttttgtctgctcccgcggtcttcagaacggccttgaaaaagttaccaaggttatgatgatctctcttctggtgatcatggttgttcttgccatcaacagttttaccatggatggtgccaaagagggactgaaattctacctgatcccggatttcgagcgtatgaaagagatcggtattatttctaccattaccggtgctatgaaccaggcattctttactctcagccttggtatcggtgctatggctatcttcggaagctacatcggaaaagatcatgcactgcttggtgaatccatgaatattgcgcttctggatacttttgttgcgatcacctccggacttattattttcccggcatgtttcacattcaatgttgaccagacttccggaccgagcctgatcttcatcacactgccgaatattttcaaccacattccgcttggaagactgtggggaagcctgttctttatctttatgtcatttgcagctttctctaccatcctggctgtatttgaaaatattatttcctgcggtatggagcttaccggctggagccgaaaaaaatccagtcttgtaaatgccatcgccatcatccttctgtctctgccatgcgtacttggatacaatgtatggtcctgggactggctcaaggtattcggcggcgcaattctcgaccttgaagattttctggtaagcaacattctgctcccgcttggttctcttgtatacctgcttttctgtgtttccaaacggggctggggctgggaaaacttcacagaagaagccaacaccggaaaaggcatgaagatccggaaatggatgcgcggatacatcacttatatcctgccgctgatcattctgtttatcttcttctttggtctgtacgataagttttttgcataaaataaaacacccctgacggatatcgtatgtgatttacacacgcgatttccatcgggggtgtttttgttgaatcaggcggatattcacagcctgcactcttcctgatacaagcaagtcccctcaccgcgtattgcttttcgtaattgaagcaaggaacttacttgattcagttaagaattttacctgcctagcagctccagtacttcctctctgctgatcaaagcctggccgattccctcgccgcttaagatctcatcagccagttcccgttttctttcctgaagagcccggattcgttcttctatggtgtctttcataaagaggcggtagacactgacaacgttctgctgaccgatgcggtgggcacggtctgttgcctgattctgcacagcaagattccaccagggatcgtagtggatcacaatatcagctgccgtaagattcaggcctgttcctcctgctttcagagaaatgcagaaaacagaagtatcatcctcattaaatgcatgtaccatctgcgcccgtttttccttggaagtcgatccggtcaacatataaaaagaaacttttgcttttttcagacggacagccagcacatccaacatggtagtaaactgggaaaacaacaggagcttatgtccgccattcaccgcattctgaaccaactccatgcacatctccagcttggaagaattccctttgtatccttcatataccagtcccggataacagcagatctgccgcagcctcgtgatctctgcaaggatctgcagtttagaagtgcgaaactccgcatccgactgcatcccaagcatcaggcgaagccgttccgtatgggcctcatacagctccttctgctcgctttccaacggggaaaacatatctttttccagcttatccggaagatccttcagcacatccctcttcaatctccgcagcacaaaaggacggatcattttctgcagacgctccatcgcatcggaattgctgtactgcacagccggaagttcgatttccttacgaaatttttcgtaagaataaaggaaacccggcatcagaaaatcaaaaatactccacagctcactgagcctgttctccaccggtgtaccggtcagcgcaagcctgaattccgaccggatctccttcacagcctttgccacctgagttccgtgattcttgatatactgcgcctcatcaatgatctgcacagcaaaatccaggttctgataagccttcagatcccgtttcagaaggtcataggaggtgatcagaacctcccgttctcccgcatttttgatcagtgctttcctctccttcacatcaccagtcacaacggtagccggaagtcccggcgcaaaacgttcgatctcgttcatccagttaaacaccagcgaagcaggcgttatcacaagggcacgtctgttttctcccggcgcagattcctgaaattctgaccagagaaatgtgatcacctggagggtttttccaagtcccatatcatctgccaggatccctccaaactgattatgcttcagagttttgatccagtaaaagccctctttctgatagccccggaggattttttcctgctccctgggaatctgaaatttatgttcttccattgtctgcatgttccggatcaacgcacgaaaggcattgtccttctctaccttgatcagatcgccgcccttcagctgactgtccagatacatagcacgataggccggaacctgagtctttccttttttcagttcacgatcactgatctgcagtccatttttcagagcagaaagctccctgagctgaccatcggaaacatccagaaagctgccatccttcaggcggaaatattttttcctgcgatcgtacctggaaagaatatcaaaaagctgcgcctgatccatcccctccacatccagatccaggttcagaagtccggctgacagagaaacgccaagacggatgtttggcagctttgtcaccctcatctgtttgatggactgggaaatatagacagctgcaactttctgcatggcggggatcccttcagtaagaagctggtagagcttttcttcggaatctttcacactgtcgggtttccctgaaccttccctgcacaaagattccagttcctcggcacgacaatccaatgccagctccatccgctggtcatcatatccgttaaaatattttgacagcagcgcaaacacaccaagctctcccggaatatccctggtgcgggcagacacatctcggtcaaaaaccgaaaatttatccttcccgtaaacagaaaatgccttacaggtgatccagtcacgctccggcgcatccagatagatctcatatgcagccttgtagcattcaagacctgtttcttccgggaaatccctgagatcacagtgaaaaaattttttcagggaaggaagcagctcacgcacaaacgcaggcacatccggttcatcaataaagcctcggcctgcaggaagccgctccagacaagcaacaaattcctccactgctccaagctcctgcctggaaaccagatataccttcgcattatcaaaatacatatgataccgtatgcctgtcacactgtataccggcgcgatctcaagagataacccctgatccttcttccggatcatcagcgtcctgtccggaatttctctgacagaatgccatgttgtttccggatcattgttcattttgaacttgaaacttttttcgccaagtataagaagcagatcctcaagttcttttctgtcaacggtaagatccctcaccttttccacagctatattcttcagctgttcatatctggacatgtaagtgccgtgatgattctcgacccattcccggataaaggccagcacgcttctggatccttctgaaaaggcttcatctgaatggataaattccagattttttccataagaaaccttctcattatgatccagattccacacaaaggccaacacatccttgaggatatattttttctcacagccaacgcggaattccacggtaaaacaatttctcacagaattaaatttcaggcaggtttccagctccaccctgccaaaatacggatccccggaaaacggaagcatacggctgtatagctggcgattaaggaggcttttcagctcaacggtggttttcgttgcaggctgccctggtccggataaagcagccggaaatgctgttccgctgaataactctgcctgcttctgttcctcatcctgctgtctgcggatttccacacgctcataggccttacggtctccatattccagaagcactgccacgcaatgcttacagatcccggaatagctgcgaaaggccgggcagtcacagtatgcttcttttatgcggtccgcttctgtatcatactgaaagcctgtattgtatacattacgcccacttcccttcactgctgcagatattttatccacagctccttccgacttaatatccagcgactggatcctctttccggtacggtaaatatcaaggcctctctgatatgccgttgtattacaaagtgcccgtatggctgttcgtttaagcatgcatctttcccttcttttcttatcgcgtttcttccattataaaaggagacctgcactgtggcaagtctccttataatactcattgatatctcattcctgatctgcctatagcatttccataaaatcccgcatcaggttcagctgctctgaaatgaattgctgcatcagacgttcccgtcatacgttggtacagataactttctcagcaggctttccttcttgcttcatcctctttccgctcttctccgacttctgtcatcagatacggatcaagaacctcttccagctctttctcagtcatgatcccttgttccagaacaagttcccggacagacttgccagtttttactgcagtttttgcgatggttgcagacgccttgtagccaatatgcgggcagagagccgttgcgattcctgcactgctttccatcaggtctttgcagtgtttgcggtttgcggtgattcctgtgatgcagtttacgatcaatgtatccactgctttttccagagtcgtaatggattcaaaaagattacaaaatacaaccggctcaaaagcattcaactccagctgtccggcttctgctgccatggtaatggtggtatcatgtcctacgatgtggaaagcaacctggcttactacctccggaatgaccggatttaccttacctggcatgatggacgacccattctgcttcgccggaaggttgatctccccaaatccggttttcgggccggaggacatcagtcgaagatcgttgcacatcttggaaagatccaccgcacaggtttttactacaccggatacggcaacaaagccgtccagattttctgttgcgtcaaaaaggtcctcggcctgtttcagcggataacctgtaatcttttccagatttggcacgatcttataaaaataagagtcggaaacgttgatagcagttcccactgcagttcctccaaggtttacggtgtacatttccctgtgagcctttttgatacgtttcctgtctctggaaaccatggacgcataaccgtggaacacctgaccaaggcggatcggaactgcatcctgaagctgtgtacgtcccatagtgatcacatcatcgaactcctctgccttttttgcaagctccttctcaagtcttaccagtgctttttccagaggtgcaagaagatccagaacggtaagcttaccggccgtcgggatcacatcattggtggactgcgccatgtttacatgatcatttggatggaccattttatagctacccttcggacatccgaggatctcaccggctctgtttgcgatcacctcattcatattcatatttgcgctggttccggcaccaccctgaatggcatctacgataaattcctcagccaattttcctgcgatcacttcatcacaggctctgacaatggcgtctgccttatcctccggaagaagccctgcattattattagtgatagctgctgcttttttaatctgtgccaggttcctgataaataccggatgaagctttgtacctgtaataggaaaattctgttttgcccttaaagcctgaactccgtaataagcctctgcaggcacttccatagttccgatcgaatctgcttccagtcttgtttctgttgtcattttgtcatccctcttctttcttctgatcctgtgcacatctgatttgctccgccctctgatctcattttttcagtccgacggatattcactgtttacaaatcattctgttattttcatttttatcagcagctgtttttctgatgcctaagaaactaacactttctttgtggcttgtaaatacttttaattgaaaaccacgattatccgtgtttttcaatagtttatattaatctttttaagaatttcttttatttttcttatttttattaagtcgtttcttgtgttgtgataacacacgcagtataatcaatacagaaatacctattttcaatccacttccctacgcagctctgtaccagttacaaatgacattttttcatcgaaaggagacattctacatggaacacaaactcgacaacatcgaccgaaagatcatcgaaatgcttcagaaaaacgcccgcactccggtaaaggaaatcgcaaaggaagtcttcctttcctcccccgctgtctccgccaggatcgaacacctcgaaaaaaacgggctgatcacaggctaccatgcccagatcaacccggtatttctcggttatcatataaaagcattcatcaacctggaagtagaacccaaccaaaaaaaagacttttatcccttcatccagtccatcccaaacgtcatcgaatgcaactgcgtcaccggcgattactccatgctcatcgaagtagccttccgctccaccatggaactggaccacttcatcaacgaactccagcagttcggccgcaccaaaacacagatcgtattctccaccagcgtagaacacagagatctgccggtggagtaaccaccctcccttgccgccttgaaaaaccagcccgtgaggcgtgtgctgcctgtcgccggactctgcaggaggggagctgattcttggctggcggaaatctgcgttgtttttcaaaagtccgctgtctgagcggctgcaagacgcgagttcggacttttggaaaacggttttagcagaattccggcagcctagaagccagcccccgacgaagccccggcgacaggcagcacacgcctcacgggcgtccgtatttcaacaaaaaaagaacagcaatgaacctcaaatccaccactgctctccattcatttcctaaatcactttcccatcaaagcaacaatcttctccttcagctcccgcgcattcttcttcggatcctccgccttcatgatcgcagaaacaaccgccataccactcataccggcaccctcaagcacatccatattcccggcattcaatcccccgatcgcaaccgccggaatcggaaccgcctcacagatatccttcaacgtagaaaccttggtaaggatcgtcacaaccttagtagtggtaggataaatcgcccccacaccaagataatccgcaccatcctcataagccttcacagcagcctccaccgtcttggcagtagcccccacgatcttatccggtcccatcagcttccttgccacagcaaccggaatatcagaagctccaacatgcacaccagccgcatcacaggccagcgccacatccacacgatcatcaatgatcagcggcacattgtaacgatctgtgatctccttcaccttaaaagccttatccagatactcccgtccacccttattcttctcgcgaagctggaccagagtcacaccacccttacaagcctcctcaaccgtacggagcaaagactcctccgtatgataagaactatccgtcaccagatacaacgttacatccaaatcttttctatccatcctaatcccctctttttcagtacatttcaatcttcaacagatccagcagctgtcgatccgaaagcccatagatctcatccagcagatttacctgaaagcttcccggaccgcgggaaatcttctccgcttcctcgccggcgatacccataagtgcagtaccaagcactgccgcagccagataattcccggatctcccatttaattccatctcaacgccagaccagacacctgcctctatactatccgtcatctctttcgcaatattatcttcgcaccccggcaaaaacgccgcagtcagtgcaccgaccatacagccggttcctgtgatcccggacagcgccgcactgccattttgtaccagaacaacccgttcaccatccgtaacaaaatcctgtttcccggtagccagcacgattgcctgattactccttgaaaaagccctcagcacctcactgacagtctccatattttccgcagtcagggcatcctgcgcccccgcatcgattccgatcgcatgagacggcagcccggaaacagccagaagctctgacatatttcccttcagcactgccgcatggccgatgctcaaaagctccttcgccagatccagcctgagatcactgcaggcaacccctaccagatccagaagaaccgggatcttattttccatcgctgttctcatagaacgcttcattgactcgatcctggcatcggtaatattcccgagattcagcatcagcgcaccagccgatgccgtaatacctgtcacctctgccggatgctccgccatgatcggccttgcacctactgcaaggaccacgttggcacagtcatggatcgagatcggattggtgatgcaatggatcagcggcttttcttctttaattcgctttcgcagttgtaaaattctttgtctcatatgtttttgaacccaaagctgcctggaatttcaccagaagacctgctttactcagagccttcaggaaaatataggcaacacatcctcccattgtggttgctgcaaggaacatcggcgtataataaaatgctgtcagtccgcctcttcccatcaggaatgccatcaccggataagaaaccatggatccgatgatacctgttccaaagatctcaccgatcaccgcgcagatgatcttacctttggaaagtctgtagaacacacctgaaagaaatgcgccaaatactgcaccggtcagtgcaagtggcgggattcccataaacatcatacggatcacgccgatcatggtcgcacagagaagggaataccacggtcccatcagaaccgagcatacgatattgacaagatgcgccgtggggcacattccctcaatcctcaggatcggtgaaataacgacaccgatcgcaaccatcattgccagcattaccatacgaagcgtgtgcatcctttgtttttccatagtgtttttcctccctgaaatatcaggcagagccctgtcagatccgggcaaaagcttcccgtctgctacagtctgcccttagattttggcggtcgaagttcccttacttcctctcactccgaaaacacggattcccatcgcttacatgatccttccggaaaaatcctccggaatatcactctcctgccagacattaaggcgctccccttcctgcccgctcgccgcagaagctccacatgcagtctctgtcactttcatatccccacattgtcagaccattccagttccattcctgcatccgaaaagagcgcatcccatggcaaactccacggagacacgctctcagatcacaatccctccgttggcattacccaaatcaggtacggtcgaagatctatcttcctctcagcctgtcacacaagctcccgctggctcttttcttttctgtttttcaatatagcacacacctatcccgttgtcaaacctccactgcttattgctctttgcactcccgccggagacgttactgttcactccgttctcagcaacacgcttcgcgatgcacagaatttatgctaatcgcataaattcgcgcggtatgtctcgggttttctgtgaccttcgctcacaaaaaacacctcgcggaatattaccagtgaacagtaacccggagactttcctgattcagttaaacaattatttcgacataaaaaactccctgcttcactacttttcatagtaaaacaggaagtatataaatcttattttgagatctcgtcgatcagacgcagctcctcagctgtaaacggtgcacagtggatcgctttcacattatcaaggatctgctgcggcttggaagctccgatcagaacactggtaacttccttatgctgaagcagccagccaagcgccatatcagccagcttctctccacgctgggctgccagatcgttcagtctccggatctgatccagacgctccggcgtcagcacactttccttaaggaatcttccatctttgcggatacggctgtcctccgggatcccgttcaggtaacggtctgtcagctgtccctgagcaagagggctaaaggtgatcagaccttttttcaaaatgccggtggttctcttgagaccgttttcttccacagttctgtcaaaaatggaataccggttctggttgatcacaaagggacatttcagatccttcaggatcgctgccgcctggcttaaggtttttccatcataattggaaagtcccacataaagggccttgccctgctgaaccgctgttgccagcgcccccatagtctcctcaagcggagtctccgggtccattctgtgatggtaaaaaatatccacatattccagacccatgcgcttcaggctctggtcaaggctcgccagaagatacttgcggctgccccagtttccataagggccttcccacatatcatagcctgcctttgttgtgatgatcagctcatcacggtatggcatcagttcttctttcaggatcttgccgaaattccgttccgcacttccataggcaggtccgtaattattggcaaggtcaaactgtgtgataccattgtcaaaagctgtaaagcacagctgcttcatgttttcataatcagaagtatctccgaaattatgccataatccaagagacaccttcggaagcatcaggccgctttcaccgcagcggttgtactccatagtttcgtagcgttcctttgcaggtgtgtacataaaaaagacctcccataatgtagcatgatttacattttctgtaactgcttttactatacttcaccggcccttatttcgcaagacggatcatattccagctgtgttttgcaaaaactgcttccagttttccgccgtccagcttcgagcactctgcactggcttttacaggaactacattctccggctgagcctctgtattggctgcctgaagatcgtcattattgagtacaatatgctctacgatcttatatccctcaaactgtctcaagtcacaggaaacttccatatcctcatccagactcttattcactgcaaagatcgtcagcgtatccttttcctcatcccagacacacacagaatccagatatggcgcttcgccataagttttgctctcgtataccggtgtgagaacctgtgtattaaggacggttcctcttccaaacacacttgtcaacatatacggataaaagatcgtctgacgccatgcgcctgtatcggatgtcatgatcggcgcaataacatttaccagctgtgccatgcaggcgatctttacacgatctgcatgacggagaagtgtgatcaacatgcttcccacaagaagtgcatcctcaaagttataaacatcctccagctgatggggcgcctgtacccatttttccagttttttatcctgttcattgctgtggtaccatacgttccactcgtcgaaggaaagattgatctgtttttttccatgcttctttgcttttacagcatcgcagatggaaaccactcctgagataaaatcatccatgcccttggagcttgccagaaaatcggcagtgtctcccgatgcatttccatagtactgatgcagggaaagataatccacctgatcgtaagcctcgtcaagaaccgtatactcccaggagccaaaggtaggcatttccagactggagcttccgcatgcaacagtctcaacctccggatccataaatttcatcaggcgggcagtctctgctgcaactcttccgtactctgccgcagttttatgtcccatctgccacggaccgtccatctcgtttccaagacaccataatttgatatcatgcggctgttcatagccgtgagccttacggagatcactgtaataggtaccacccttaaagttacagtattccagaagatttttcgcatcctccggtcctcttgttcccaggtttactgccatcatcacatcgctgccggcttttctggaccagtccacaaactcattgagtccaaactggtttgtctcgatgacaccccaggccagctccggtctggacggacgctgagctttcggcccgacgctgtcctcccaacggaatccggatacaaaatttccgcccggataacgaacgatcggtacctgaagctcccttaccagctccagagtatccttccggaatccctgctcatcagaaagagggctgccttcctgataaattccctcataaaccgcacgtccgagatgttctataaaagaaccatagatccttttgtctgtttttccggtgaggaaatatttatccacgatgatctgcgcttttttcattgtaaaaatcctcctgtaaattattattttctgctgctactgcatttagctctgtttccgattccgccgtatatcagctcttacgcctctgttcgctcacacactctcagacagaccggaaatcaaccgtttctatgtttcattttaccatcctgttctatccataccagtgattatcttccgaaatagttgactttttttccggtaagatttatcgtaaagacagtcttaccagacggacgtccctctgtcactttactttatacttccagacagaaagttctttacaatgccacagtcggattgtctgatctacgtaatgaaaggagcgcagcattttcatggatttcaccttaaatttctgcgaatacaaccgttccaactccgattacgacaggattttccgaccggagggaagcggagattttctttttcttttatttaaaacaccaatgaaggtttatctgggcagtcagcttactgtcacccgggaaaatgcctgcatcttttatattccgggaaatccccagcattatcaggctgtgcgaaaattccggaacagttatgtccatttttcctgcggagaaaacctggcaaaacggttcggacttccctgcaacgaaattttttaccccagtgactgccaggagatcgatcactgtatccagaagctgcagcatgaatatctgaacagagaagttttttcccgggactacgagtatgccctgctctgccagctgatgatcacagcctcacgggaactccgcagtacagatacaggcaagtctgcagactcggagctctgcagcctgttccaaaaaatccgtctggaaatgcttacaaattacgaaaagccatggacaacagaaaagctctgcgccatggctaatctcgaaaaaagtcagttttattcctgttaccggaatttttttgacagtacccctcatgctgacctgaatctgctccgtctggaaaaagccaaaaatctgctcaccaacgaagctctgcctgttcaacaggtggctctgctgtgcggattttcaaatctctcccacttcagccggtacttccgaaagaactgtggctgttcgcccagtgagtgggcacgccgcccctgaccaaaaggatattcacactctgcattcactgcgcaggcaacttgtctgatctgatcaccgtgccgcattacacttctcataagcaaacagtgccgcaccaagcgcaccacaaagctgtgcctcatcacagatataaagcttcgcacccagcttctcctccagtgcctggatgatacctttatttctggcaacaccaccggtcatcatgtattcccccggattctttttgccaaggcgggctgcaagagctcctaccttggaagcaacagatacattcagaccatggatgatatctgccacgtccttattctgggcaaccagggaaactacctcggactctgcaaatacagtacacatgcttgagatcactacgttctctttccactccagaccacgggtactcatctcctccagggaaagtccaagagtacgggccatcatttccaggaatcgtccggttcctgctgcacatttatcgttcatcaggaaattttttaccgcaccgttctcgtcaatgctgatcgccttgatatcctgaccgccgatgtcgataactgtacgcacattcggattcagataatgggcgccctttgcgtgacaggtaatctctgtgatactgtcatcaccactgtcaatataggcacgtccatatccggtagtaacgatacgcacgatatcttctttcctgatccctgctttttccacggccatctccaggctcttctctgcactcatcatagcgccgccgcctgtgggaatgatcatggtcgatttaatttttccgtctttatccaggatcacaacatccgtacttgtggaaccgctgtcgatccctgccacataataaactcctgattccatttttttccttatctcctcgctgattccttttgatgggtccatatcctcagagccttccagggtctccgcaaaagcctgcactctggtaaggagctgtcctgcactctggcttgtaaaatctgtctcgatcttcagaagcggaaccttgatatcacgcttgatgcttgcatactcaaatccgtaatagtcgcagaatttaatagtatgataaatgatccccttcaggttcggatccagatacagccggtttcttcgggtgctgttgttcatacggaagcagggcatctgtgaaagaagtgcatccgcataagccaggaacatggcatcgtcttccattttttccagctcctcacggatcactgcaagacgtcttccacctgtacaggtcaggttttccacatccatgcggatattatcccggatcattttttccaggatgccgctgacacggacacccagaacaccgatatacggctggttatccacaggctcatgggaaaaagcattcagaaatccacttctgtcgaaggttttccccgaaaatttctcataagctttcttcagacggtggatgccctgggcaagcttcaccttttcacagtcgttatcctcatgaggcatgtccagcatgtacagaaatttacatttaccggtactttccacaatgtcgtacacacggcgcatggaatcacagcagttaacaagaacaagctgctctacctttccctccagcactgcctggatcacagattttccgaagccgcagagattagcatgggcgatctggtccgaaagctcaaaattctccggcatttcctcaagaaccgcacattcctcgccaaagcccttaaacagctccagcggtgtatatttacagacgtaatgtatcatgaccgtttttcctccttaccttctgacagcatttccagatatgcctgaagtcgtgtggatacctggccgtcactggaattggccgggttacagccgtcaccgtccaggaccatggttggaagtcctgcattttccagagaatttttgatcaggctggaagctccgatggttcccttgcagccccaatgcgcaaaaaggatcccgccgtctgcctctgtaaggttcgccagctcctgggcacgccggatcctctgcttcacacttccgttgtaaatgcagttgaccattttttccgcaagggcctcataaggatccgaggcctgcatccgctgaaaaccgtctgcaacaaaatcacaggcactgatatgcacgttctggctgtaattaaatacatcctttaccggctcctgcaaaaacggcatcatatgcatccacaaaatatgaagaccttccccctttggtgccttcttcacatcctcaagaagcatttttgtatatttcagggattcctctgagcccgccagaagatgacacataaagatcgcatacagctcatttgtcagggaagtcaccggatcgtgatcctttctgagggcaagctggctgctgtaataggaggccgcttcattgctgttggcaactgcacgctgtaccgactgctcggagatttttttcccgcctacatcctccaggaatttcttcagctcgcggagctgatctgcaacatagctgatggaatcctgatttttttcatagggtacgtcaatataaaagcccgggatctgatatttctgtttcagataaggaaacgtcatcatgtttccatcgcaggcaaggtttgtgtagatggtacatttgggcttcggtaccaatcctgtcatggacgctcccaaaaaaactctgtgataggagcacatggtttccggaaagccctctgattccgtctgtgccagaaatgcctgctcacatctggttccggcgatgaagcaggacattgcctccacggaatacggagtgatccctgctgctgtcagaagctctcccggtacaaaaatgctcacaagcgcggtatcgtccggttttgcaagggctttgataatattctgcatgactacacgggctacatactgtcccgaagccggaagcttcctgtcaggaaaaagctgcagacgtttttcctgaagccggtatccagtgagaagaagttttcgtgctttttccggatccctgatggatctctctcccaccatatccccgaatttctttataatatccaatctgtcacatcctccgtcaaatcaaaaaatctattataagtctgtcagacgcttacccgaaattttgtctcaaacaaaatcctgtagcattatcatcgtctggatggtataaaggttccacctgtcagaccaatatttttattataaagatatttttttcaaatgtaaacacgccaatttttacaaatttgaagccttttgcacatatcaaaacatcaaaatgcagattttccacaaaactcgcattccttttcgtggaaaacccgcatttgtcttatcgcattatcttctgctctgttttttccgttactctgtatcacatctgatgacgtaccaccttatattcatctccggaacgataatacggacattccttgtaatcactgctcacaaaacgataatattcatcctcatccagattgacatcacaataatattcgtcacactcttcatcatatgtatagtttgcacagtattcgcagctggttcccttcatatttatttctcctctctttgcaggaaagtatttctccctgctgttctcctgattatataataaaaaaaggaagaattccattactgaaatcctccctttttttatatatcagaacattccgttcacagtcttgtatttgtaaagcatctccgcatgattctgctcttccacctggatatctgccagaagcttcctcacaccactgtcttcaaaagcaaaaacatccgagttgtattctccggaaatcagcttttctgttccgatacagtctgttgcaagaaaagcatcgtgttccttatcctctgaggacatcaccgatgtgtaagcagcctttggctggtaatcacggccgtcactgtcattacagtttacctgtggaactgtaccggaaagcacctggctcagggaatcgtaatgctcctgctcttttgtctgaagagtctgaaataagcttttaagctccggatccctggcctgctgtgcgtattttccgtatttttcaatgcagcttttttcctgtgtctgaagatcctggatcactgtgcgttctttttcctttaatatcattatgatcatcctttcttttgataataatgatagtatggtttggaaatgcgattttattcatgttttacgcagtcaggatctccatcagtgctccgtaaagatccttgtccagctccatagactgaagctcagataaaagaaccggcagcttctttccggctgtgatcagctgatataatctgtccttcagtacaaaaccgatctctgcctggttcaggaaatcaaagacacgctcttttgtctgattgtctgccacttcgccagcgagaatgatctgcacctctgccgctgtgtctgcttccacttccacacagatcttctgaagcttctcctcatattttacagcagcctcagtctctgctccgttaaccagaaccttcacagtatctgttcctgttttcgcaaaattacagaactccacggtataagctctctttgccgggatcagctctgtttttccctgtgcgggatgaatggtaaacactccctgatccttttccttataatccatttccgtaaatacacaggcaccattttcgtaagcacaggtttcgttgtcatcctcatacaatctgaagcttccgtcagcacccgggaatacccggatattcaggctttccggattcttttccgcctctgttccacggatctcatcggtcatcaccagaataccgcctgcttttgcaagaaccgggatactgtccagagtacggtacatatccaccattcgtccaccctcatagcgcagacctgtttgacactccccacagctaaagcagggggattcttgcttctcccactactgcattggcaaacaccttacggtactgcaatgtcttacacagtgtccacaagctatatttatactgttcccgtatgccctacggtacagtttttatctttatgcagactgcatctgcagtccttttttcagaatattgatacttgcattcgtatcccggtcatgaaccgcatggcatttgggacactcccagatacgaatgcccagattttttatccgtggatttctgtagccacaacagctgcaggtctgactgctcggatacatcgttggtactctgtgaatttcatttccataccagccagctttatattccagcatttcaaaaaattttgcccaggaaacactcgctatcgattttgacagtttatgattccggatcatccccttaacattcagatcttcaatacagatggtttggttttcacgcaccagcatcgttgactgtttctgcaggaaatcattccgctgattggttactttctcatacactcttgccaccctgatccgctgcttctcgcggttatgggaatctttttgttttcgggaaagcctgcgctgttctcttatgagttttcgcattgagcgttccagatatctgggatttgataccgtatttccattactgtcggagtagaacgctttgatcccgacatcaatccctatcgttccgccagcatttgagcgtggttccggttcaaaatcaacatttaaaaccgcaaaatattttccagccggtgtgtgctcaatgatcacgtgattaatcttttccacttccatcgactgccgtattttaacaaatccaagtttcggaagtttgatatatcttcccacaatacgaatattatctttttgatttaccgttctgtatgactggaaccggttatgtttacttttgaaggttggataggaagcccgtttctcaaagaaattcacaaatccccggtcgagatcccgcaaagactgctgtaatgcaatggaatctgctgctttcagaaaggcaaactcctcttgctttttcagttcagtcagcatggcggaagtctgggaatagccgatcttttccccattttcatagccttccttacgcatggcaagtccccggttgtagatgaaccggcaacatcccagggtctgatggatgaagtttttctgttctctgttcgggtagatcctaaatttaattcctttttgcattatcccatcttatccttttgtctctgcgatgttttctggttttcaatatactgttttactgtttccagcggagcaccgcccaccgtcgatacaaaatagctgtttgtccagagagtcggcattttcgttttaagatagggaaattcctgtcttaaaattctggacgtatagcctttaaatgactttacagctttgtggatgccaaactgaggatctacttccaaaagcatatgaacatggtctggcatgatctccatctccagaatgtctacagaaagatttgcagcatactctgtgagcagctccttcagccggacgtccacaccgttaattaatacttttcgtctatactttggacaccatactacatggtatttacaggaatagacgacattgttgtttgatttatatgttgtgttcatatttgtattatactatggtttatcagttaatacaattactattttgtccatcttcaattacttgcataaattacgatcagagtaatcactaccgtaataacaatactgtttaaaagaaacggataaaattaaagtgtgcgttcatattgatgtagttatcaatgatgaatttctgcggaaggagatgatgctccagagccatgatctcctgattttccttaaaggatgaagcttctgatccgccagcactggcaaagctccgggatttccgttacaaaccctcccgatacacgctgttgatcgtagcctgggcgtgctccagctctttcttccggacgatggcttccctatcacttaagatcgccagcatctcatcgatcacatcctccactctgggacttgtcaccctgtataaataccccagcatccgtgtagctgtgtaatcggtattcatatgtttataggcgatttcccggcacagctcatcgggatagcccttatcctgaagcgctctgtaaagctcatctgttcttgtatctgccatatcctcctgagattcctttcctgtttttattataatttcgccaagcggatattcgcgatccgctttcgctggttccatccatattcagtacaataaatcgaacatttcccttccactctgctacatgatcacaaacacgaccgtttcacgatttatcctcctcatccatgccattttctttatcagtcttatatattctccggatccccaggatcaatgttacgaaaatccctgcgatcagcatccacaccggccacataggtgccgttcccagattcccgctgatcccggcataaagacatactccaatggataacagcttgatcacagacatcatttttgacgcaatctcaaagatatgctctctgttttcctctgtcacctcaaccggatagttccaccactgtggaaatctctgacagaacatcagaagtgccagaatcagcagccccaaaatcggctccagaagaaggctgcccttcttcccataccggtccgggatcccatgcgcattaaaatggatcggcaccctctccggcagatttccccaggtggccacaagatacatcacgtacccaaggatcatcagaaagcaaagcacatctgtaatattccgcagttttttctcagacattatccatccccctttcattgcagaataaacccgtctgtaaattaaatactctttttcctgtattttacacacaaattgcctgtctgtaaaagtattttgcaaaaaaagacctattatagccatatctgcgagcactaacgattgcatacgaaatttttatatgataaaatagacatgttgtccaaaaacatatttaagaaagggaaagaaatatgttagaaaaaatcttcaagctgtccgcaaataaaacggacgccaaaactgaggttctggcaggtatcaccaccttcatgacaatggcgtatatcctggcagttaacccgaacatcctgtccgcaaccggcatggattccggagctgtattcacagctaccgcactggcagccttcctgggaacgctgctgatggcaatcttcgccaactacccgtttgcactggcacccggaatgggtctgaacgcatactttgcctatacagttgttatcggtatgggatacagctggcagtatgcactgactgcagtttttgcagaaggtatcgtatttatcgttctttcacttaccaatgtacgtgaagcgatcttcaatgcgatccctctgaacctgaaatccgcagtcagtgttggtatcggtctttttattgcatttgtaggattacagaatgccaatatcgtgatcggcggctccactctgctgcagcttttctctgtagatggctacaacgcagccaagggtgtagaggcttccttcaacaatgtgggaatcaccgttatcctggctctgatcggtatcatcgtaaccggtatcctggttgttaagaatgtaaagggaaacatcctctggggtatcctgatcacatggggacttggaatcatctgtcagttcgccggactttatgttccgaacccggagatcggcttctacagcctgctcccggatttcagcaacggactctctatcccgagtcttgctccgatctttgcgaagctgcagtttgacggagttttctcactgaatttccttgttatcctgtttgcatttttatttgtagatctttttgatactcttggaactctcgttggtgtctcttctaaagcaggcatgctggatgaaaatggcaagcttcctaacatcaagggcgcacttcttgcagatgcagttgcaacaactgccggtgcagttcttggtacatccacaaccactaccttcgtagaaagtgcttccggtgtatccgaaggcggaagaaccggacttaccgcagtgacaactgccatcttatttggcctgtccctgttcctgtctccgatcttcctggcaatcccgtcctttgccacagctccggctctggtgatcgttggattgtacatgctcagcaatgttatcagcattgatttcagcgatatgtccgaggcgatcccatgttatgtatgtatcatcgcaatgccgttcttctacagcatttccgaaggtatctccatgggaattatcacatacgtagccatcaacctgatcacaggtaaggcaaaagaaaagaagatcagcgctctgatgtatgtactggcagtgctgtttatcctgaaatatattttcctgtaaaatatggcaaaaaaattcccgggccttttgtcccgggagtttttttattccagcaaaatattcttatttcttcggctgataccgcatattcgatacattataaaccgtgataaacgctttcgggtcctcctggtttataaacttcatcagcttctgatattcacctttatctacgatggtgatgatctcacggcgtttttccatgttataggctccgatggcctcatagatcgtggctccgctgtgcaggtcatgaatgataaactgcctcagctcctcttcctttttcgtgatgatgcagacacgccgcttgatattattgtcaaaaataaaatgatccagaacgattccgttaaaatacgttcccagaatacttaagaccaccgtctttttatcatacacaagcgccgcggaaagtgccacgcacataccggaaagagacatggcttttccaagttccatgtggagatacttattcatgatcttcgccacgatatccagtccgcctgaggatgcattccggttaaaaagaatgctaagtcccacactcactaccagaatataacacagaacatccagttcctggctatctgtcatggaaccgaaatttggaaaaatgatctcaaacaatcccagaaacaacggcagcattacactggtataaaccgtcttaactccaaactctcttccacaggtaaaaaatccaatgatcagcaataccacattcaggatcatggtaatcgccgacagctgcagcggcacaaagttggaaagcacgattccaagaccggaaatactgctgaccgacgtatggcttggcaccaggaaaaaatataccgctgctgcgatgatcgccactgctacggtgagaatcacggtttccttaacgatatccgcataattcagtttctttttcatgatttcagatactcttcccattctttttctttagcgcccaccagcaccttgtctttcccaacaaggattggtcgtttcacaagcatcccgtctgttgcaagaagcgcaagctgctcttcctcactcatctccggaagtttatctttcagtttcatctctttataaatatttccactggtattgaagaaacgcttcagcggaagaccgcttttttcccaccaggctttcagttcctctgcagttggattgtccgtcttaatatcacgcaaagtatattctgcgccactctcatccagccatttctgagcctttttgcaggtactgcattttggatagcatacaaataacatcttatgtccccctgttcttcggcagtaaatacgtaaattcactgctgtctttttttttgcctacagcacagaatttttatagaactttttcactgtactgtccaggttttattttaacatagacgatgcggtatttctatcctcttgttccgaccatatcagcttcgattcctgtttcatctcatccacaattttctccgctgcatccagatctccctttgcttccagctctgttaattccagactcttctttccggcctcctcactcatataataaacctctgttaccgtttccgggatgctatcatcttccggtgatacttcctctgtctttttggaaaaatcctgaagcagcatgtcatcgcctttcagttccagagttcctgcatatggcgcgtcaatggcgtagacgaactctgtttttccatcttccgtgtactgtactttcattcggttgatgagattattggaagaatacaatctattattttttacgtacattccgctattttccagggtcatgtatttttcgttgaaataccagtgattgtagcctgctgccgcagcgatgagtgtcaggataactgccactgctgctgtcagcactctgcgtattattaattttctccggatttttttcagtgcggctacgcttccggtatttgcattactttcagtattttccgtcccaccagttccacatcctgctacagaagctacagatgatcttatccgggcctgctcttttccctgctcttctttcatgatctccaacatttttctgcattcctgacaggttcccatatgttcttccaccagcgcccgactgtcttcgcttaatatcccatctatataagatggcatcagatcctgtattacgtcacatgtaatcttcatattccagctcctctctgatctttactcttgcacggtaataagtcacccgcgcccagttttcactttttccaaaaagcattccgatctcactaaacttaagctctccgaatgtccgcagggaaaaaacttctttatacggttccgaaaggccatgcaaaactttgtggatctccatagcctgactccgctgtgccagcttttcctcaaaaatttctccaccatggctttctgctgtttccggctgctcctctccgggaagttgctttttctgctttttcagatggtcgtacaacgtattctttgcaatctggcaaagccacacccgcacatcgcagtcatcacggaactgatctgcttttttcagcgccttaaaaaatgtctcctgggtcacttcctcagccagcgctccatcccgtgagacagaacggatataccgatatacaatgtcaaaatatgtccggtaaagttcctcaatattcatcggttctttcttttcctcccttctcacttataagacgcactgatctcaaaaacgttacagaaaatttctagtcttttaattgatttttcttttttactttgatacgattaatccaattatataaaaataataatatatttttcatgaggtgattacaatgtccaatatctttgatattactaaattcgacttgtacaaagaagataatcgccgcgaagtaaagaaatccaatggtggattaccatcttctttatgggatacctactctgcatttgccaactgctatggcggagtaatcatcctgggagttgctgaaaataaagacggaagctggagaactacaggattaaaagcagaaaatcaaggcaaattattaaaagaattctgggatactataaacaatcgaaaaaaggtaaatataaatcttctcaccgacactgatgtagaaacctttaaactcaatgatgatatgatcattgtaatttatgttccaatggctcgccgtgaacaaaaaccggtttatattaatgatgatatttttaatggaacttttcgcagaaatcacgaaggagattatcactgtaccaaactccaggttaaaacaatgattcgagatcaaactgataatactatggatatgagtgttcttgatgacgttcctatgactgatctgaactatgaaaccatacagggatacagaaaccgtcacagatcattgaaaccagcacatccttttggccgcctggatgattttgagtatcttcgcagcataggagctgccgctatttcaaatatcgataagcaattacatccaacagctgccggaatgcttatgtttggagatgaatataatattgttcgtcattttcctgagtattttctcgattatcaggaaatacttgatccttcaatacgctggacagaccgcttacaatccagttctggagaatggtctggtaatatctgtgatttttatttcagagtttataacaaacttatcacggatataaaaatcccttttaagactgttgatggaaatcgtatcgatgatacacctattcacgaagccctcagagaagcattagccaattgtttaataaacgctgatttttatggcgtacgtggtattgttatcagaaaaaatactgaaaaaataatatttgaaaaccctggttattcccgaactggtaaacaacagatgcgtaaaggtggaatatcagaccctcgaaataaaatattgatgaaaatgtttaatctcatcaatataggtgaacgtgccggaagtggtgttccaaatatttttaatacttgggcagatcaggggtggcctgagccaatcattgaagaagaatttgatccagaccgcactatcttagttcttactattaagaaaaagcgacgtacaaaaacaagcagtaaaaaacaagcgataaaaacaagcgataaaacaagcaataaaacaagcaataaaacctttcaacatatgaataaaataaaaaaatatctgtccaaaaacgggccttcaaaaacaagcgatatcgcttcttatataaaattaagctctccacgaaccagagctatattaaacgaaatgcctgacgtatcacatgatggtcctaataataatagaaaatattttttgaaataaacgtttcttataaataaagccccttgtttcacaatcgcaaaacagggagctttatttttttattcaaaaccaatgcgtaatttccgacggccggtaaccttacatctgacgatcaatcagctgcagtatctcggacattcctcgtacactctgctctctgctgcataccttcacatcgttccatgcttttcataatatttctttttttccgcatacataagatcatctgctcttctcagcattgtctcaagctccgaagagctttcctcccagacaacaccaacagaaacactgatccttttggcagcaatgctatcacagatatcccggaccttactccgaaaaatcttctcatccatatcaaaacagatgagtacaaattcatcgccacctacccggtaagcattttccggcagaatcgcaagcatggaacgcgctgtatttatgatcagcctgtctccggcctcatgtccgtaaagatcattcacccgtttcagaccattgatatcaatatatgctacgcttgtttttatcactgtttttgcctgcatgccttccaaaacctgaatatacctgttcctgttatacaaggtcgtcagcatatcacggtagctcatgtactgcagacacgccttacgctccttggctttcaggctgtccgttaaaaagtactgtatggatgacagcagcgtatgatcctcataatgcagtctcggattatctaccccgagaaatcctatgatctttccgtcactgtttaaaggaacggccagcagcctggtaatgtcctgcatcttcagagtctcataatacggctgcccctgctcctcctcaatatccggaatataatacaggccatttttccgaaagctgtccatccagatatccagcatttccatgggaacctcctgaagattatccttctcagcagtcactccgttcatggcatactcataggtatttgtacagacattcctcttttcatcgatctgaacaatataactgcgatctccgtcaaaatacccgctgataatacgcagcagattggagatcgccgcatcttcatcttctcctgatatcagctctgcaatgcatttattcagtatcgttgcgatctcaagtctttcctttatcttaccctctctgcttatcagctgatacatttcctgattcagctccgtcatcgtcacgataaacataatgatcatggaaataccaacagaaaaatcgatcagcgacattccatacctgaatacctgcacagctgccgccactgccggaagtacaatgcatgacagcatagagaacaggagcttcctgctgactctctttttgtactggagcagaagcgtaagatcaatgagcaagcctgctgccgaaaaaagaattgacataatatataacggtgcccgatgataacaattatccccatctatgtaataataccagtgagtaaactgcgagatcaccacaaaagcaacccctgcagcagcaataacatatccggcttttactctttttaatgttctccgctccctcttcgaaaacagataaacacacacataaatgtgaaaacacagcaggactacgtcacttaaaaggaatacgagaaaactcgaaatacggaccatcacattgcccggaactccgggatatccgctgaaaatatgcgccatggcatccatcagcaataacagggaagcaaaactctccatcaggataagataccgacgcttttccctgtcataattactgctcagaaatatacataatgcagctatggcacaaaatacacatccccatataagtatcgctacctgcagtactttttcatccggcataaaaaacactcctcacattcgtcacttacaataagtattacactttaccgtgcaaaagtcaaccttccaaaaaaatcccggagtacattgtcatactccaggattttgtcgtcaaccggataaaagcaaccgcattcgctacataattctacaccagataactgcttcgcagttgattcagttaaagctcttccccgcaggattcaatcacttttttgtaccagtaaaaagaatctttgcggattctagaaaagtctccggtcccgtcatcatttttatttacatagataaggccataacgcttcttgaattctccagtggaggcactgacaagatctgtacagccccagcaggtgtagccgatcagatctactccgtcatggattgcttccttcatctgctctatatggcggcgcatatattcaatacggtaatcatcgtgaatctttccatcctctgtcagctgatccaccgccccaagaccattttccacgatcatgatcggaatctgatagcggtcatagatctggttcagaacatagcgaagaccagttgcatcgatctgccagccccagtcggaagctttcagatatggatttttcagattgtcacttccatttccggccgttttctctccgtcctttgtcacgctgacacagctactggaataatagctgatggtgaaaaagtccaccgtacccttcttgaggatctctttatcctcctgaagaacctccagctggattccgtgctcctcaaagtatctcgctgcaaatcccggataatatcctcttacatgaacatcaccggcaatggaattgtggatctgcccaaactgctgtgcatataagatatcatccggatggcaagtatatggataaccattgtgataagcaagcatacagccaagcataaactccggatcgatctcatgagccatggaaactgcaagtgcacttgctaccagctggtgatgcattgcctgataacggctctgctcacatacatccttcgggtccagcattcctgcacagaataccgcaccaaagtcctgcgtcagcatattgatctcattaaaagtcagccagtattttaccttacctttatatctctcaaataaaacctttgcaaatcgaagatagaaatcgatcatcttacgatttttccatccgccatactccagagaaagatgaaggggattctcataatgagagatcgttatcagcggctcaatgttatattttctcagttcgtcgatcacattgtcgtagaacttaaggccttcctcatttggagtttcctcatccccatttgggaacactctggaccaagaaatagaaaaacgatataccttaaatcccatctctgcaaaaagagcaatatcctctttccagtgatgataaaaatcagtcgcctggtgattgggataaaattcttccggtaacggtgccggcggtgtaagacgacgttccttatccacacttcctcctgtcaggatatctgcaatggacgggcctctgccatcctcatcccaaccgccttcatactggtttgcagcggttgctccgccccagagaaagttttccggcatacggttataatttttcatattttaattttctcctttttacaaacatcaggcggatctgttatctccgcctgatgtttcgttgttattcttatacaatagtcaggaatttatctcctgcatttacagctgcatcttctttttccatgcatactgctttgatataatcagaaatattggtcacaacaaccggtgtgatcagatcatatccttctttcttaatggcatccatatcgaattccacaagaagctttcctttttttaccttatctccatcagaaacatgggatttaaaatatttaccatttaaatttacagtatcaagtccgatgtggatcagaatttctgctccactttctgtcacaaacatgattccatgtttgctgtccatgatatttgccaccgtaccatctgccggtgcataaacctttccttctgatggaacgattgctgctccgtcacctaaaaccttatccgcaaaagttttatccggaacatcggaaagtgcttttacagttcctgctaccggtgcacaaagctcgatcttatctacaagcggagcgttctgctgtgccggctgtttttctgtatctgtgttctgtacttcatcctctgtctcagcctttacatcctcaaatccgaagataagcgtaagaacaaaagcagctacaaaagataccacgatcataatgattccataaatcagattgattaatcccttctcgccgataaacgccgggatcgccatgatacaattctgtgcaatgtaaagagaaacctgaagaagtcctcctacgataccaccgattccggctgcgatagaagctgctacaaccggtcttttcagtttcagtgtaacaccatacagagcaggctctgtgatacccataagagcggaaacacctgctgcacttgccagctgtttcatgttgctgtccttggatcttacagctactgcaagagaagctccggactgtgcaaggttagagcatacctgagatacaaagatcagtgtatcggtaccaccggttgcaatggcattcagtccgatcggtgtcagcgcatggtgcataccggtcataacgatgaacgggaaggttgctgcaaggatacctacaataatgaaaccaagttttacggacaggaagttgatggctaccgcaagtccgttaccaataattgttccgatcggtccaactacgatcagggcgatcggtgcactgatcagaattaccagtgtcgggttcaggatcagttttaccattttcggtgtgatcttatcaaccagaatctcaatataatgtgtgatccataccatcaggataaccggaataacggaataagaataagttgcttttgtgatcggcagaccaaacagtgtgatggccgcatcaccagctaccatagttacaaaggtagggcttaagtaaacaccggcaataaacagtgccagtgactggttcacgcggaaaaccttggcagcatttgctgcgatcaggaacggcatgaagtagaaagtaacatctccgataaaactgatcacctggtaggtactgcttgtttctgataccagatgaaaagttgtcagcagggtaagtacaactttgatcataccggctgcagtcagggcagggatcatcggggtcatacatccggtgatggcatcgataacttttgaaacaacactctttgagctgtcagagttcgctgccggtgcatcatcggtaggaacgcctttgtcttccaatgccttgtaaacagcgtttacttcgtttcctgcgataacctggaactgatcttcatgccagttaacgccggagatctcagaaagctttaagatctctttctcgttgatcttcgatctgtctttcacatagaaacgaagccttgtcatgcagtggaacagacgggtgatattatcttttccgcccagcgctgcaatcagtgtgtctgcagtttttgcatagtcctttttcatttggggacctcctttaataataaatattgaaatttatattaaaggtcttgcctgaaaagatacgcacatagcacgtatttcagtaacaatccattaacacctaatttataaaacaatctcttttcacagatttttcagacgtttatggtcttctgtgatcttctggatatgaatcgtcagatacagcatttcatcctcagtcatagcgtatttatattcctcttccatcataagatagatcatttttacacagccgtaagcttctctgtactgctccttgatgatcttgaaaagctcctgattctcatcatagtgaagctctttatgaaggaatctctgagcaaaatatttcagatgcgtgagaaaccgctgataatacagattatcctcctgaaattccatattgtcataatacttctccacgatgtccaggatctgatgtacgataatggaaatctgatagctgtccgtcttgccgccatcttccgcattcacaaaatgcaatgcaaaaaatcctgcttcatctgcagaaagatctacctcgaacatctcatttacctttttcagtaattccaagccgatctcatattccttatgataaagctgcttgatatccagaagcagcatattctgaaggcggatcccgttttcaagtctggagatcgcacccatgatatggtcgctaagggaaaaataaatactgtcatttaatttcatcccctttttttccttcacttcatttacaaaagcttccacaaaatccagatatttttccggaatagcagtcagataaccctgtatctccttgctgatctgggcattttccgcagtaaagatcttctcgatcctggactcctccacttgctgtcctttctttttctgaaaggcaattccgcagccctttacaataacttcatgtccctgtccatccctggacagtatcagattattattcaaaatcttatggataaccatattcctgttcccccgctgccagacaaataaaaaaagaccattacagtatatagaaaacctattcctatactactataaggtcttgcctgacgataaataaatatttcagtaacaatccttctgattcgtaactattaataactgtacgtaatagtatcagaaaaaatatatgttgtctatctggaatatttaataaaatatttataatatttttgtgaactttgacaaaatcccctgatgatcctgccatacggatcaacgggggattttctgttcagctttttattcttcagatctcttttccctttgtcgcaacggcatgtacaacaaacggtacaaacaatgtaataaacgccgcatatccaaggtatgcatatccctttttaacaactgtcatcagaccgaactgtgcaatggcaaatgccaggaatgtaaagatcgctgtaaaaactgcatttcttccaaggtgtccctgcgcttttttcgccgggctgtccatacgacgctccactgcatttacgcagcgggtcacaataccggagatcatatttactgctgtggagatagctccaaggatgatcagcagagaaatgatcggtgtcaggataccggcgcctacaccgttctggacaagtaccagcatcggtaccgatgcagatgccagttcacttacatatgcaatggcaagaagtccaaggatggaaagctccattgcacagaagttgcatacaaacatccagatcgctgctttgttgatctgtttttcgtccgttacatcctccatgtgctggtacataacagaaacagatgccagctggaagaagaaataaaggactgctgaatagagagccggtccaaaggctccgctctcggaggaaagtacagtcatttctccggaggacatagtatggatggaagctgtgatatctccccactgtgcaatgatattcggaacaagtaccagtacaagaccgatgatgatcagcacacttaatgtagaagcacattttcttacgacattggttccgaaaagcgcgatcacaaagataaatgctgcaatgatcagtgtacagagccagtatgggatcccgaacagtgtctgcagtgtggaaccgccggttgcaaaggctgctgctgatgcagttccgatcatgatcaggtaacaaatctcatagagattggacataaccggtttcgtttttccgtaaagactgtcggaaaagcttctgtaatcgtaggttttgtgtttataagcatagcgcattccataccagaaaaacaatgcatacaatccctgtgtcactgccggcaggatcagacaccagataccgtagttgataaagtactgatagatctgcgctcctgatgcgaatccgcctccgaactgtgtggtaaatgcgacgaacgcaagtcccatagccagaggcattttactttgtaatgatttattctgactcatctctctttcccccattttttatttattatattcgatgacttttcccggattcaggatcagtttatcatcgaaagccagcttgatggctttataaagagcgatcattctcggtcccgcaaattcttccaagaattccagacgtccgtttccgatgccatgctcaccggaaagctgtccgcccagttccttggacagtgcatacagctctaccagacttgcgtgagtggcttccttccactcctggtcactcatttccggtccacggagcatctctgtatggatatttccgtctccgcaatgtccgcagggctctacacggataccatgtgcacttgcgatctttttggctgcttttacatactctgcgatccttgcacgcggaacaactacgtcacactcctcctgtgcgacagaatctgctttcattccttccaaaatcccgccccggacactccatacagctccggcacgctccggtgtgcctgcgatacagcagtccagggctccgtttgccagggctgcttccgctgctgcctctactgcgctgtcaagttcctgtttactggaagcatcatacataacgatcagcactgcttctccctgttttactgggaacattttattcagattgcgttttacgatatcgatcagttctctttccagaaactcgatggctgttggcacaaacggcagctccagaaccttcgggaccatgtctgcacattcctcaagactcctgaacggcattacaagggtacaggtgcaggtcggtgcgggaagaagcttcagcgttacctgagtcaggatacataaggttccctctgagccgatcaccagatcttttacatcatatcccgttgtgttcttcacaacgttggatgaaaaattcatgatggaaccatccggcataactgcctcgatacagcggacaaaatccctggtcagtccatatcgtaccgctttcatgccaccggcatttgtgataacattgccgccgatggaagctgttttttcgcccgggtccggcggataaaaaagtccgcctgccgctgctgccgcctggatatcgatgagaagtgctcccggctccgctgtgatggtctgattctttctgtcgatcggaaagatcttgttcatgcgcatcacggacagcatgatcccaccatatttacaggttgctccacctgcaagtccggttcctgcgccacggcataccaccgggatattttctttatatgcgtaagccatgatggctgagatctcttctttatttaaaacctccacataaagctccggaggaaaaactccgtactccggcatctcatcacgataatattcttttgcgatctcgtcgccgacccatacacgatctgaagcagtcacagaacggatgtagtcaaaatcttctgaagtcatttttttatagggatatgccatgacttaatcctccttccgattctttatcagttctgtcagctccggtacaacctgatacagatcatccacgatgcagtaatctgcaacattaaagatctgtgcctccggatcattgttgatcgctacgatacagtcagatcctgtcatgcaggaggtaaactggatagcaccggatacgccgcaggtgatgatcagcttcggacggacagttcttccggaaagtccgatctgatgtgcaacatctccgaatccgttttctaccataggacgggtgaaggcaagctgtccgccaagggcatctgccagttcccggcacatttccacatccttttcattccggacaccacggcctgctactaccagaacatcctcttcctcaaggctctttaccttatcaatgaccctggatgacagaatcttgatcctggaatctgccattttttcatttaccggacatacaaccacctgaccatgcggattttttactttttctgccttgtccataaccttataacggaccgtggcaaactgtggccttgatttggtgatgccgatctgagccatgatatttccgccgaaagccggtctgatctggatcatatcggtgttggaacggatatccagagttgtgcagtctgcagtcagtcccgtatggaatctggtggaaagcctcggtgcaagggaacgccccagcgcagtagctccgatcagcacagagcttggtttgtttgctgcgatacagtctgcaactgcgtctgtataacagtctgcgcggaagccttcgaagccttcatgctcatatacgtacacattgtctacgccatacggcagaagcttttccgcattttcctttgttccttttcctccgacgatcacacagttaacctgataaccgactttgacagccatctttcttgcttctccgatcagctcaaaggtaaccggatggatctctcctctctcctgctccacatagataagaaagtttttccatttatccttgtcaaaggatttcgccttctgctcaaaccggatagctttctccgggcagttacgaacgcaaagcccacacatacgacaggcatcgcctacaacaattccatttccctctatggtaagggccccaaaaggacatttctccacgcatactccgcagagtacgcatttgtttatatcaaattttaaaaattccatgttccgcttccccctatatgatcttctttccggtcaggagagcaacaagcttgtctgccttttcctttgcagttccttccagataaacctgtttttcactttcctccggcgcaaacattttttccacagaggtgggggaaccgatcagtccgtaacggctcagatcctgatccggcatatcttcaaagcttaagatccgtaccggacggtctgaagttgccttctttaataaataggatggcagacgtggcacgcaggtatccttgtcaatggttaaaagacatggatacggaatctcggaaacctgggaaacactgacaagatcctgacggacctgaatgcttttttcattgacgtccatgatctcagctacccatgcagcatgtgggatggtcagatgctctgcaatggccggtccaacctgggctgtgtcaccatctgtggtctgtcttccgcagatgatcagatctgcaccgccgatcacctggattccctgtgctaacgcataagaggttgccagaacatccgctcccgcaaattttcggtctgaaagaatcacgccctcatcagcacccatggtataagcatcccggatcatctcttccgcctgaggcggtcccatagtaagaacggttacagttccgcctgttttttcccggatcgcaagggctgtttccaatgcaaacagatcatatggattagtccttgtctcaccggacattcgtttcatggcaccggtttccggatcgatatcaaccttggaagttgccggtacctgcttcatacatacaacgatcttcattttctatcttctttcctgtattttcacttttattttttgctttaaaacgttaaacagctgtataagtatagcattaacgtggtataaagtcgagagggttttggtaaattctgcacaaaaaagcattgaaaaaacttttaagcatgctataattactctccgttatcaaataaagcagacatatgaatctttacaatatcacatcgatcaaggagcatatatgtaatggaagacatccgtgcaatctacagaattttcaacaatctaaaatatgaaatggaaaataatggatgggtctatcagtggcatttaggcgatgaacctataaaagtaactcataaatttaaccctcctgtaacacctgaagaatttcagctgtttgaaaaatattttcccaatatgaaacttcctgcctcatacaaagcttttttatcctgctcaaatggcatggaacttttttgcggagaggaaggcagttctttagtcagctgtaccatttattctttaaaaagagcgctcaaagaaaaggaatcttggaatagtacgcctattttatctgatccggagtttacatatcatcttcctgttctttgcttacaggacatcggcgatataaccatggatcttcaggctgtatcagaaggcagagacgattacctatgctatccagctccagatactgatcgttttaatatcccttttaatgaatggctggaaagatatatcgtatgccaggggcatgaattctggtatttcttgaatccataaaacagaaattttatgaatatttttcgtaaaaataccccggaagccttacggttccggggtatcttacgtttggacacaatgtaccttgcggtactcaatatatattaaattaggatgttatactaattaacggttactcgataactgtagcaacacgtcctgatcctacagtacgtccaccctcgcgatactttaatcccgttttacctcatattttttatggttttctatccaaaatacagtgaaaaacggctgatttgcaccatctatttttatttgcctgatttcttggcaccgttttggcaccggacgccttgttctaaatacttcgtcatcaacacctactacttcctctgccattttcttattgcacccattattttttattgttataatcagaacatgggtgctaccataacggtaggcggttagtccttcaacagagggactgtgaccctctgattacatagaaacccgaaagggaatccactggaaaggagggctaagccaatgagtattgtggacttcattgcagttgtgagcttcggcatcacctgcttttgtgccggatacacattcggcaaggataataataagacacaaaaataaccgccccagcctcgcaaactgaacggttatttttaatcgattaagtatgtggactaaccgtctatcggtagcactctttttctataatcatattatcacgcatctgtggaaatgtcaaaaaattctttttctattagaatatagccacccacgcaaacaggaattgagatttcatatattccaagggatttaataactgttatattttattatcaaatatctctcaatcccttgaaaacacaaagtttatcgcatgtgagctttcccttattgttttccttgcgttatatcgtcccaccaatgtttacgaactctgataagggcaaaaacaagaccaagaaaattatataaaacagtataacacaaaataaaagtgacatggtgaactgattgaaatgcttctgatttttgcaacaaatgattgatttaacgataaggaaatttgatacgatgagaacaatatttgcagaatacaatcccaagcgcaacagtattgatgtttacacctctattggctatatgctccgcattgactgttgggaagctgaaaaggacttaaaaaccacaccaggatcagactgtgcattaaacccactcgccattgatgaacctcttgaatatgcaagattatatcttgatggaaacttgcttgatgtatcggttagtcaaagtgtctatatcagaaccttttatcgttccttgatatagacactttttttaatagtcattcaattaactaattgatattttcgccgtttgttgaaataacttctttataccactcgaaagaatctttctttcttctggacaagtctcctgttccatcgttatgtttatccacatagatgaatccatatctcttatccatctcaccggttcctgcactgacaaggtcgatgcatccccatggtgtataacccatcagatctacaccatcttcctctaccgcctttttcatttctgaaatgtggtgctgcagatattccacacggtatggatcgtggatgcttccatcctcttctaaagtatcatatgctccaaatccattttctacaataaacaatggtactttgtagcgatctgtaaaccagttcaatgaatagcgcagtccgatcggatcaatctgccatccccattcacttgcctttacgtactgattctttatgcgatccttttctccacggtaatcatattccggattgtctggttctgcttttgtacagaaagacatataataactgaaaccgatgtaatcgacacagccctgttttaacactgcaagatcttcttctgttacgtcaatcttaaggtcttttctttcccagtatttcaaaatatttacagggtattctccttttacatgcacatctgtataataatatcttttctgcatggctttttcagcctgcagtatatcttccggacggcaggtagccggatagattgggcacattgcgatcatgcagccaatctgaaatttcggattaatctcatgtccagcttttatcgcttcggcactggcaaccagttcatagtgagatgcctgatacatcaattcttccgcattttcttccggtttaattataatcccggaattagcataaagcataaatccatcaccgatatctgcctggttgttaatctcattaaatgtcatccaatattttactttgtctttgtatcgctcaaagcatgttactgcaaatttcacgaagaaatcaatcagttttctgtttctccatccaccgtactcttgtacaagatgcagaggcatctcaaaatgactcagtgtgatcactggttcgatcccatatttcagacattcatcaaacatgtcatcatagaattttaatccggcttcattcggctgttcttcatcaccatttgggaagatacgtgtccatgcgatacttgtacggaaacacttgaatcccatttccgcaaataagcggatatcttctttatagtaatcataaaaatcgattgcttcatgattcggataattctcgccttttagtatttcacctgttattcttcttcttgtatttacatctccgccggttacaacgtccataatgctcaagccttttccatctcgatcataggcaccctccagctgatgggcagcaactgcgccaccccagagaaaatcttttcgaaatcccattgttatttccttcctgttgtcttaattactttgtataatagcgttgggggcttttgcccccaacttttctgtttctatattcaattacatcttgatgattatttctcatcaattctcttatacagtgtaatgaattcatctgcaagaatgcggaatgcttctgcactcataagctgatcttctgcatgcatcagaagcatgtatccattggaaatttcaccatttgcatccattgccaaaagatctgcatgaacgttgtgtccaagtgaaaaggcttcatctccttgtttaatcagctctgctgcctcatcatattttccttctttcgcacaatggatcgcattgataaaatgtgttcttgctgtacctacatatgtgatgatctgaaaacatgacaattcaaatttttcgttcatttttttctcctatcctgctattatttttattctgattttaccagtcttcatcctcatcttctaccggctgattcttctcctgaaccagattcatcttgtcaaccttcttaatgaatggcagataaacgaagaatgaaacacaaaggatcactaactgaagtaaagcacttttccatcctgctaaaaggaatcctgagataatcggtggacaagtccatgggatctgtgttgctccatataatgggcagattcctgtatacagtgcaaaatactggattaaacatgcgatcacaggcattccaataaacggaattgcaagcattggattcataacgactggagcaccaaacagaattggctcattgattccaaataatgccggaataattcccaatttaccaagtgctttcaactgttttgattttgcaaagaagaacatatacattacaagtccgattgtgatacctgcacctgttatattgataaactgatcataaaactgctgtgttacaatatggcctccgtttgctattgtaagttctacaccactgtcaataatagcctgatttgcaaggctgtttgcctgtaatagtcctgtcatgattccaccaactactgttgaaccatgaactccgaagaaccacaggaatggtcctgtaaagcacatcagaactgctccaccaagggagtctgtcattttctgaagtggtgtctgaacaactttgtaaataatttcaatacctgttgtgtcgaatccaatagaacagataccgtgaattactgcagcccctgtcaggattacgaatgccgggattaatgctgagaatgcatttgttacaccttctggaactccggccggcattttaatacgtatatttttcttcaagaaccaacagtaaataggcggtacaatcaatccgacaatgattgctccaatcattccctgtcctgctgtccatgtcttattaataattccactaacaacttctccaccttctgttgttatggacgaaggcatcagaatcaagaatgttgccagtgaaataattccacagttgagtggttcctgattttccagtttcgcatagctatagctgataccgataactgcaatcaacgcactgatggagaatgttgcgccacatacctgatctaatactggtttgattcctgtagactctaatacatcgacaactgcctttaccggaaagtttgacaggatcaggaagattgatccgatgatcagaggagacatggaagtcaccataccattttttattgactgtattgcctttgtattaataaacttaaggattacagggattactttttcgttaaatttctctttcatttgctactaccctttgctctgttttttgctttaaattgtgtatctttgttttctcttatttatttttcgcaagcttatatgcaaatttcaaaacattcattccattgcacattccataatcctgcattgggatcacatctaccggaaccccttttggatcacagatctcttttgctctggcaagctgatatcctacctgtggtccgagcagtgctacatccacgccttcaatcacgcgttccatctctgtaaatggatatgctacgatatcaacatcttttcctttttcctttgctgcctcttccatcttctttacgagaagactggttgacattcctgctgcacaaaataatcgaattaccatgattgtttcctcccttatttttttctcatttgctttgatggtgctagtataacaagtatttttcgttttgtcagtactttttcctgtttctggtttctgttccatatagacggaatttgttacataaaaaaaacagggcattctactttattgtgtaaaatgcactgttttccttttcctttttttgtatattatgatactttttcgtgtattctgttttttttgttacttatctggttactattcgtaccattacattctacaaccttaatgaaataagtcttccatatcattttaaaacagatcatctgtatcgttatggacgcccttcaattctcttccgattaattccaaaataaaaacgactgccatctgggatgtcagatcataatcttcgtcttgtttatatttatactctgaaacataataatttatattgcagtcactcatcttcgccaaagaacagtttgccttatttgtaatagatatcaggctgctccctcttcttttcaacttttctgccaacatcagtgtctgttccgtttctcctgatacagacaatgcgattgtagctattctctcaccttttccacgaaataccggcgtgaacggatcatcaatagcaaatgaaaaccagcctacattattaaaatatcttgccccatactttcctataaaagaagaattccccacacctacaaatataattgacgatgcctttgtaagtaacttcacagcttcctggatattctcagcaaatgcctgtgtctgcacccgttcaaagaaatctttaaccgcagtaagatccatattgattttcttcttttccttgctgctgacttcctgttttaatttcaaacggaattcagaatatccctcgcatcctacctttttacaaaagcgaagtatcgtcgttgttgaaacatgaaccgcctctgccagctcgcgtactttcatatatactactttctcttcattgctgatgatgtaattatacacatccatctccaactgattaaaggattttatcatctcatgcgtaaacatatgaattcagttcccttctgtttttctctctattccataatcatattatgttctttagaagcagtgtttatcccgcattttaatcgtgtttttcattacttcatcgtcttcgccagtgaattgagaaatgcccacatctctggattagccaatacttttgccagaagttccgaatcgacttcatcagcaacgattataaatagtagacctactgactcctaagatttcctgtaactcttgaactgtataacatcttttttctgacatttctttattctcttttttgaaatatgaaaaaaacaatatcacatctcgtttccgatggtattgctgtacattgcctgtgcattaacaatttctgattttgaaattgtgtctgttgtaacaatgcttatctggatcagtattccagctcttgctatatatatacgacatgatttcgggcatgtcaagagcagacgtcaaaaacgtccttcatttctatctccacaactttttcatcatggtctctctgtttctcactacctatattcatgtttgacctccttttccctggactaaaaaaaagcccagactagattttttgtaaatctaatctgagcgttttatatctctcatgtctgatttctcagacaagaaaaccaattttacagatttttccaccccaaaatgaaaaaagcagtaatgaattttcttaatcattactgcttcaaacaactgttctcagggggaatcgaacccccaactagcgcttaggagttcaagtccccacagaaaatctatggttagttaagttaatataagtcaaggaaagacttgattttaccgactttcctgtaaatccatgtcaaaataagaaaactgaaaatcatctaagttaagcacctctcgctgacaaatgagtgacactgtcaccctgagggttcaaccattccgttcctacaaattcatatttatggccaccattctcactcaatatgcggtaatgataacactgttttcttattagattacctatattataacgtgtgtgaggtcggatgtcgattgttttttgaccattatttacttctatttgctttaacttaaaaagccagaagctaatgctcccagctttactttttttattccatcagttttacaaacttgaatttatcgtcttgttccattcttatcaaaattctttcttaatgctatttctgttgggagaatagatccaattaaaggaataagttgaacaccacagataattcctcctatactcccaacacaatcttcattttttccaattactaaaagcatgaatattactgttatcggcaacataaccattccacagacataccaaactttaccacaatatttatgagcaaattcccatgtgtctttgttcttcatagacatcgaagtccgatatccaaatactgaatttatttcctttggagcctttttcataaaatatcttccaaaaccaatcatcgtaaatggaagaagcaaatccataatcaacataaaaatccaaaaccccattgtaaacctcctttactacaacttggaatttctgcattactcatcatccttaattatatataacaaattattatatcctgactgcacaagtaattgcttaaagccagaaagcacttcttcttttgtataattgttgttaagcaaaaactcactatctttctcactaaggtattgatagaaaagagctgccgccatcacctcatcattatttgcataatcaatgttatctaaaagtatattctctgcttcgttaatttgccctgaatcaatcatatcaagaaaacttttcaaatttttccctgacacttcatatttgttttctttttcaagctcaacagaaacatactttttcccatatattaaagagaataatattctcaccatttcttttatcattcgcataatgtaatctttctcatccgtgaaatacattttccacctccacaaagcccgattcgtcactcatcaatatctattctctcaatcttaaaaataacaggtcttgtaccgtcattacagcaagtaatcataaccttatcgtcattcatccagccgtgcatgattgctccaccttgaagagctgaataaatatatctgctaatagcatcccacgcttctgaacagaatggaactccatccgttccacagtgcattgttcccggagaaagtaataccccttcatcgggctttccgctttttatcagtgtgcctgctcccatatgccagtagtcatcacgctcatcgttccgataaaacataaattcatctccaacattgtagcaaggacattttccactgtcgggtactgcacaatattgtgcctgtaattctgaaaataattttttgtccaaaacagtaaccttaactctatgctccatatcgtatctctccttaaaacaacgatttatccaattaagacaactgaaattttattctttgtcgttcaaaagattatttactctttcaactggaaatctgttttcaatgtcaattatttcaaacaaatttaggggtaattctttctctccaatcagagtaagatattcattaacagctctgcggtcaatcataattttcccatgaccgtcccaatgacgattgctctctctctttttcaagccagaaatccaatattcatcgccgttttcaatatctacatagttagaataaccaccattatatttttgaaaagcatggtcattaaagtaaatggttttcttggtttttgaagttttcacatatccaatccatgctggaccatcatcagaatatcctgtttttagttcaatatacattaaatctttaatcatttatatcactcctaaattcagatttgtttcttacattctatcatattctactacaaaactctattcttagattatcaaagagcagccttacgaccgctcttttctactcacatatatataatctctttcaaaacaatttcttctgcacagactttaatattattcatcaatccaacccatttcatctgatcctgcattttcaattcttccgtcacaccatgtttttctgctatctgctttactaaagtttccaccttctctctgacatcctgatcgacttggtttagatggcctgtcagtttccccgtcatcagtaaatactgatatcgtgctggtttatgctctttcaggaactgttttcgcagcattccgtatttaccatatgtcggttcttcctcattcactgccagatctggcaggtaatagtctccatgcaatctgtaacttaatccgttactttcatcataaatgtgttttttcatattcttacaactccattcctctgttctttgttttatttttcttacgctgttggttctccatttcactctttcgggaaccccaggcaagtctttcatggatacttcctgttggcatttgctccatttgtcgtttttcttctaatgccttctgctcttgtatatcctgttgtaccgcatcatctacaacagtttccccaagaactcgtactacacgatcatatctatcagaaacatcctgcaattgttgtttttcctcaaataactgctcattctcttcacgcactgtgtctaactccctttgcatttggttatatgcctgcttcgttttctgatatttatgtctccacccatcaacttctttagtaagttctttgacctgaacagccattgcagctattttatttttcatctgaataaacaacggtttgattttcttgtcacggtacgctgttgcacgttctaaagtgccggcttccggtagaattgctttaactgtcccatattctttcatttctttgctgacataatccattaccggttgtaatcgctccctgcgttcttccagttttttcaattcctgttctgctttctcggcacgttcttctgctgtctctttatctttctgaaatcgaaccatttcttcttccaactgcttgatatctgcccttgcttctgcaatctggcaattaagaccttcattctctgctgtgagatattctttctcctgttccagtgcctgcacttcttttttacgctcttttttcttaaaattgtaaacgtccagatgctcctcatgtgtccctttctgctcccattcaattccatgctgtagagcaatctctgcaagcacttctttttcgtggtttatccattgattcaattctgtatcctgttttgaaccaccttcaaatcctaaactctttaatgcctgtttcaacgaaactcttgtatccattccttttcccttccatccggtcacataagggacaaaatcaacatgcagatgtggagttgattcatctaaatgtaaatggcaactaaacacacgcagcgatgggtttcgtttttgaaattctttcatatactcatccaaaatctttactgccagttcaccctcctcagttcctacagccgtgtctgtacaattcccaatctgaaaaatcacctcatgaaacagcttttcctgtttactttgacgtatcttctcgtagtaatctgtaattttccggtcattcctttttcccacattgtatctctccactgccgaatcaaacagttcatgataaactgctttcagattttcatcacagtacttaatattcagatgcactcttgtcttatcgacattttctgtctcaaatgcccgtctgttgtgtgccagagaaccttttccatttctcccacttattgttctttttatcattgcttctcacctctctttctaaaaggagtgccagatatggcacataatttgttccacgccaattatggcgattataagaaatcttcgccggatacggcggttttgttacttttgtcaaaagtaacgcaaaagcactttcgacagccgtaccgtccatcaaaagtacccttgcgccctgccgggggctattcctcccgttggtcggttcactcctgcgttacttgtatggctgaattatcccggtatccttgcccggatatattccagatcaccacaatacggtgttcctacaagataccattctcttgcaggattcatttccattctagtctgaacccattcatcatcaagcaacacttccaggcattctccacagtgaaatcctgtatcaatccatagatctgatgataataatccatatcttttgttataactgttatatcctaatcttccttctcgcattatgccattctcctttcatttagcgtttccgcagggacgccctgaatcagctcccttttgaaaattctcttctacgccagtcaactcccgactacaccttaccaacattctccttgtctgctatctacaggtgcgtgacacgctcctgtaataaagtgttcagaaagaacctttaccatcgaaagttctccggtattccctgtctatccagatattcctgccggaacttttctctttcttcttccgttggtgctgttttggatttgctgtatacttcacgattcaccattgcatccagttttttctccaatcccaaccggattatttcttcgccatcgtagttatccatcaaaaaatattgcaagagctgaaagaataactcgtatggaatctgtacacttttattttgcatctgttctcctttcaaggtagcaagattccctcttcttaagaaatggtaatcttgccatcttccatttttattctggcaacatccaataccattgctttccacgttttacggaatcaatttcaagttcccgtttggcgttccatagcgttttacttttgattcctctggcttctgcttcttctgcaattttcttctgagtcattcctccatttgccagtatctcaaggagaaattcttttgctttccgacttttctgtcctcttccgtctccattaagaagttcatcggcactgatatcatattctccaatccattcaaacccattattcttatccagtctgaatgtaatggacattccttccggtgcaagagaactcttcgtatgacataccactcttacttccggttcatctttcactcgcccgacaatcagaacacttcttgcagcagcctgaaaatcaatggatccaagtcctcgataagaagatttgccgttgctgtttttgttcatatgaccgattaaaatgactgcacagtgatatttttctgacagcactgcgatacgcttcatcagtggtctgatctcatttgccctgtgcatatctacgtccgctcccagaaagccctgtatcggatcaagaacaaccatttttgcttttgtctgcacaattgcttcttccaatctgacatctgccattgtcagtggctggtcactgtcatcaatcaccagcacctttgaacaatctgcacctgcagcaagtaatctgggtttgatagtatctccaagtccatcttctgctgtctgatagattacatttacaggtgacacagaagactgttcctgcatattatcttcagcatctaaatcttcattctcactatcgacttcatcacctcgtttttcttttgttttcgttgtatcagtaacaggaagaatcggctctcctctggtcagttttgcaataatctgaagtaccatcgttgtcttgccttctcctggatctccctgtataatggtcacttttccataaggaataaacggataaagcagccattctacctgttccacctctactgaatccatattgatcagtttcagttttggttctattctacaattctcaattttatttttttcattcatattcattccatcatctcctcttgcccttccgggcaagtctctgatgaacagatattcgggaattgtcgtatttcccgattcgtgatatactgaatctgccaagatggtatatcagtgaatctgattatcagagaacttgctcagattatttatctgggctttttcttttgccttttcaacattcatctctttcttctcccaatccggtaacagcatttccattttcattatccagaagatttgcaatctttctctgctgatttggataaagatgtccataagtgttcaatgtgatacgaatatctttatgacctaatctgtcccgaatcaataacggttccacacctttctcaataagataagccacatgactgtgcctgatatcatgcactcgaattttcttcactcctgccagctcaatctgccgtttcatcttatgctgtaccgcttcctgaacaaccggaaataatctttctgtatccggcattccgtaatgaccatctacaaattccttaatttcctctttcagaaattccggaatttcgattgtccgaaaggactgttttgttttcggttctgtgataatatcctgcattcctgtccggtaataagtcttattgatactaagctgattcttttcaaaattgatatcagcttttgtaatcgcaagcaactccccgatcctgcatccagtccagaacaacatctcaaacataagataatatcttgttcccggctccattgtctgtataaactgtttgtactcgtccagtgtccagaagttcaaacttctcgaatctgaatttcccattcgtttcactttcttgcatggattaaccagcagatcatagattttagctgcatgtgtaaacaggctggtcaactgattctgtatcattctcaaataagaatctgaatatcctttcttctgtatttcattctgccactgaataatctgcgaagccttgatctcactcatcatctgatttccaaaatatggaactatatgctgttgcatcatatatcttttatttttgattgttcgatctttcagatcattttgtttgtctgaaaaataaatctcaataaaatcgctcagcttcatatccatacttcgctcactgcttaattttttgcttcgttcaaactccaatgcttctcgttttgtttcaaatccacgctttctgcgttttttcttctcacccatgacatttgtctcaaaccactgggctgtccatttttttgtgtctttttctctgtaagccatattgatcctccctaatttcctgctatttcatagccatacatcttttttgcccaaaacgcctttggtattcttccagccatcgtaatatatccctgtgcagatagttctttattcatagctttcaccagtttataggcatgagactttgagcagtttaattcctgtgccacttcatcagcactcatcatataattgtaacttgccatattgcctcctcctttcctctccagatatagaatacgttcactgtatttctacgtctgtacgattttcgtaaattgataatatcatgtatttcaatcgttgtcaatatttcgtaaacacatttttacgaacttcgtatataattttttctttattttattccacgtctgtgctatgatattttatagatttatgtttttcgtaattttctaatatatgaaaaaggaggattctatgggtgacggtaaaaatttaaagaaatatcttgatgaaaaaggcacaaatgtccgcaaaattgcaaaggcaaccggaatcagtgccacaaccttatattctattattcagaaagattccaatattcgatttgattttgcattaagacttgcgaatgaattgcaaattgatgtgaatgagatatgttctgccagtccattttctggcacaattaaggaagaagagatttatcctacacttccagacggtttaaatggagcattagatgcaagccgtgtaaagacttacttaaaaaattccatgtacccgttgatgtatcttttcggtaagaacagtatgcctgatgtagataatctgcttacatcgttctatcaacttgatgatgaagccagacaggaagttgtggaaactatccgtttgaaactgcaatatcatcgtgatccagaacgtgctgaacagatcaaacagatcaaaggctggtaaaaaaattactcctgtgaatggcaaacattcgcaggagtttcttttttggcaccgttttggcaccgctggtctgatttttcaattctaaatttatccgtatttcatcttactgataaatgtttcgctatttctaatctgataaatttacgaacaattcttttcttagagtacagaaaaaccccggaaaccttacggttccggggtatcttacgtttggacacaatgttatcttgcgataacaaatctattttcagattgtattactcgatgattgtagcaacacgtcctgatcctacagtacgtccaccttcacggatagcaaatgtaagaccctggctcatagcgatcggatgaatcagctcgattgtcatctcgatgttatctccaggcatgcacatctctgttccctctggaaggttgcaaacaccagttacgtctgttgttctgaaatagaactgcggacgatagttgttgaagaatggtgtatgacggccaccctcgtctttagtcagaacgtaaacctgagctgtgaattttgtatggcatgtaagtgttcctggtttagcaagaacctgtccacgctcgatctcgtttctctgaacaccacgaagaagtgctccgatgttatcaccagcctgagcctcatcaagaagtttacggaacatctcgataccagttacaacaactttacgagtctcctctttgataccaacgatctcaacttcctcagatacgtgaagaacaccagcctcaactctaccagttgcaactgtaccacgtcctgtgatggagaatacgtcctctacaggcattacgaacggtttatctgtgtcacgctgtgggtccggaatgtactcatcaacagcatccataagctccatgatcttgtctccccatgggccagccggatcctcaagagctttaagagcagaaccctggataaccggaatgtcatctcctgggaagtcatactcggaaagaagatcacggatctccatctctacgagctcaagaagctcctcatcgtctaccatatcacatttgttcatgaatacaacgatgtaaggaacacctacctgacgggaaagaaggatatgctctttagtctgagccataacaccgtctgtagcagcaacaacaaggatagcaccatccatctgagctgcacctgtgatcatgttcttaacgtagtcagcatgtcctgggcagtcaacgtgtgcgtaatgtctacgctctgtctgatactcaacgtgagctgtagaaattgtgataccacgctctctttcctctggagctttatcgatatcctcaaagttctctactacgtttcctggaactctctctgcaagaactttagtgatagctgctgttaatgttgttttaccatggtcaacgtgtccgatggtaccaatgttacaatgcggttttgttctctcaaacttagcctttgccattttaaaatgtcctccttaaaacttggctctatcaaaattagagcattttttcagatttaaacttgctaaccttgattatattgcaaaccaaggttatttgcaagcattttattattttatatcagatcagtcctttttggaaaggatcttctcctgtacagacttcggaacctgctcatatttctcgaagaacatagagtagttaccacgtccctgtgttctggaacgaaggtctgtagcatatccgaacatctcggaaagcggaacatatccacggatcatcttaccgccgccgatatcttccataccctcgatacgtccacgacgggagttgatatcaccgataacgtcacccatgtaatcctctggtgtagtaacttcgaccttcatgattggctcaagaagaatcggagctgctttctgcatagcatccttgaatgcaagagaacctgcaatgtggaatgccatctcagaagaatcgacttcatggtaagaaccatcgtatacatttgcatgtacaccaactaccgggaatcctccgaggataccagctttcatagcttcctcgataccttcgccaattgccgggatgtattccttcggaatagcaccaccaacaactgtggactcgaacttgtacagctcttctccgttggcatccataggctcgaatttaactttacagtgaccatactgtccacgaccaccagactgtttagcatacttgctgtctacatcaacaggcttggtgattgtctctttgtaagcaacctgaggtgcaccaacgttagcctcaaccttgaactcacgaagaagacggtcaacgatgatatccaggtgaagctcacccataccagcgataatggtctgtccagtttcctgatctgtatgagcacggaatgtcgggtcctcctcagcaagcttagcaagtgcctcaccaagtttgccctgtccagcttttgtcttaggctcgatcgcgagctcgataactggctccgggaactccatggactcaaggattaccggatgctgctcgtcacagattgtatcacctgttgtagtgaatttgaatccgatcgctgcagcgatatcaccggagtaaaccttatccagctccatacgtttgttagcgtgcatctgaagaatacgtccaacacgctcttttttatcttttgtggcattcagtacataagaaccggagttcattgttcctgaataaacacggaaataagcaagttttcctacgaatgggtcagtcatgatcttgaatgcaagagcggagaacggctcatcatcagatgaatgtctctcaacttcgttgccgtcaaggtcaacacccttgatagccgggatatctgtaggagccggcatatactcaaggattgcatccagaagtttctgaacacctttgtttctgtaagcggaaccgcagcaaaccggtactgctgtacactcacatgtagcttttctgaggacagctttcagcttgtctacagaaggctcatctccctcaagatactccatcatgaggtcatcatccagctcgcagatcttctcgatcagctctgtatgataaagttctgcatcttcctgcatatcctccgggatatcagtaatggagatgtcatcacccttctcatcattgtagatgtatgctttcatctcgaaaagatcgatgattcctttgaagtcatcctcttttccgatcggaagctgaaggcagatagcgtttttaccaagacgagtcttgatctgctctactgcaccgtagaagtttgcaccaaggatatccatcttgttgatgaatgccatacgaggtacattgtaggtatcagcctgacgccatacgttctctgactgcggctcaacaccacccttagcacagaaaacgccgacagcaccatcaagtacacgaagggaacgctcaacctcaacagtgaagtctacgtgtcctggtgtatcaatgatgttgatacgatgctcaagagcacctggctttggtttgcagttctcctcaagagtccagtgacatgttgtagcagcggatgtgattgtgataccacgctcctgctcctgctccatccagtccattgtcgctgtaccttcatgagtatcaccgatcttgtagttaacacctgtgtaataaagaatacgctctgtaagagttgttttaccagcatcgatatgcgccatgataccgatatttctggttctctctaatggatattctcttccttcttttccagccaatgaattttcctcctcgaattagaagcgatagtgagcaaatgctttatttgcctcagccatcttgtgcatgtcttcttttctcttaacggatgcacctgtgttgttcattgcgtccagaagctcattagccagtctttcttccattgtcttctcgcctctcttacgtgagaacattgtaagccaacgaagagcaagtgcctgacgtctgtctgctcttacctcgatcggaacctgataagtagcaccaccgatacgtcttgcttttacctcgagaactggcatgatgttgttcatagcctcttcaaatacttcaattgctggtttaccagctttttcctctactctggtgaatgcaccgtatacaattttctgagcaacacctttcttaccgtctaacatgatgttattgataagcttggtaaccactttgttattgtacatcgggtcagccagaacgtctcttttctgagtatgtcctttacgtggcacgttacttccctccttaatcatattgattatatcatcggtactcacgcagtaaaactattgcatgttcgcactggtaaggtcctatatttaacccgcaaccgacagggtatatggaataccgtacaaatccttatagtcttccgctgtaatacattagatgaataatatctttgtaatcctcctgattatctgcaatcaggaagcggcgtagatttctgatctacaaaaattattttttaactttaggtctcttagctccgtatttggaacgagcctgttttctgttagcgacacctgcggtatcaagagtacctctgatgatgtggtatcttgtaccaggtaagtccttaactcttcctccacggataagaacaacgctatgctcctgaaggttgtgaccctctcctggaatataacttgttacctcgataccgttggaaagacgaactctggcgatctttctaagagctgagttaggctttttaggagtagctgttttaacagcagtacaaacaccacgtttctgtggagcagcctgatcaactgctttctttcttaaagagttgtatgttttctgcagagccggtgctgtagattttttaacagctgtctgacggccctttcttactaactggttgaatgttggcattccatttcacctcccgatttatttctccatgggctttcccatggggccttgcggttgctatttacaaattacggcatgcgaaaatataacgtttcattcgcacgcttgctcattatagaccgtaaatacagggcttgtcaaggtgttttataaagaatttttgctgattttacaggggttttacacggttttctccatagatgtcacaacctgccggaaatacccatttttcttctgctgatataccagagtattcccagtattcctgctattaatatagaaagaactgctcccgcctgcagccccggagtccgatatttcatagtaaccgtatgtgtcccggccgaaagctttacaccggtaagcccctggatgcttttcccatcgacctttttcccatctacataaatctgcatatcaggatcataaaatatgctgagaaggagcattccatcctttgctgcagctatggtaccctttccattcttcagatccatctgctgggaagaaagcatttcatagatctcatccaggtccgattcccggtaagttcccagaaccgcttcctgcattccggtttccgcagttacatgcacaaccgtatccgtatcataagtgccaagatccaggaaattattattccagtaatcggatttctgctcctggccgttgatcgttacagtttccggctctgtccccggaatatagagatacccatgctccccttttttcagcgaaatatcaaaatccacagtcccggcccatactgcttctgaagacaccgtctgcattttgtacagtctttttcccgcaataccgctgagcagccggttctgaacttcaagtggatctgttccttccattacatagtccagtacagaatcactgaccatatatcctgctttcagtgctctcggattctcatagagatcaaaggactggctttctccgatttttttataaacaatatgaagctttcttgtattcctgcaaaacagatatcgtattcccagaagcatatccgtcacttccgtggatcctgcatactgaaaacgattttccagattttcaaagcccatgttttttacaaaatcccacatttcctctgtattagtagaggaatacatagatatcccgttcagctgatacagcatctcttcattcctcacaagaggatttacgatggcggcacggtaatccacctgatccacaccggcagattccagtaatccacaaacctcctgctcactttccacataaatatcacggtttgcggttccattatctgtaatactgacgattccgtgaattcctgtctctgcaaggatcagcactgccagcaccagacatcccagctttcgaatctccacacagcagaaggcatgaccggacagttttccacagatacaccgttccgtccacataaccagaaagaatactgcaagaacccctgctgtaagcagaagtccccagatatttccacttttgatccccacaacgatacagaagccctctgcagcgatcagtccggcaaaaattcttcctgtgctttcattttccacatttccccatgcatcacaggacattttcaacagcagaaatatcaggatgaacacaaaacgattggggattcccacaggtttatgcaatccgtgaaaaagcagattcagcgctgtgatatggatccccgcaaaatacaaaacgatcaatatacctgttacgattttttctgctgtgcggatttctttattcagaaaataaattccggcaaaaagcagcactgcacagccacagtaaaggttcacatctccctggtcgccggattttacaaaggacagggaatcctcgaataatgcgcccagctgtttccagatatctccgtacactcccgaaagtccggtgcctgcctcttccgccgctgcagttctggataccgcagcaattccggggatcagtgtgattcctgcaagtccggctccggcaacagacgccccggcaaatttcaataatgaaaaacggattttctccggccgtcgaccggattctgccgcagccagctctgccagataataaaaagcagcaaatgtgcataacataaatcccatataatagctggttaaaatacagtaccccagcaccagacaataccctcgccattttccggtatgcaccagctgttcaataagatatgcaagcaccggaagaagcatgatacagtccagccacatcacattgctgtaatagcctataaaaaaatcagacagtgcgtacatacagccaagagaaactgccatacttcctctgcccggatattttttcccggaataccatgccatggatacgctgcaaagccctgccttgatcaggatcaccgcagtgacagcctcgtttacatacatgaatttcataaacagcagtattaggaagctgaacggactgcagagataatagcaaaacaatccgtaaaaattatatcccatggcatgtgcagaccaggtccagcccgttccctttccaagctgctctgaaagttccctgtaaaaggctgtatactgatggactccatctaccaccagcgccgaattttctccaaaaggataaacacccttcaatgcaaagcccagcgtaaagatcagcaccggaaacagaaacgccaggagatagatccaccctctgtttccctgttttttgtttttttccgctttctgtattcttattggtctcatttcatttcctcgtctgtctgtagtaattccagtccgttctgttctggacagctgaattatctatcggctgttattttctgaaatactgttatttcttttccgtcgttttttcctactgtatcatgtttttgtgaaattactgcgaattttttcagagcaaaagaaaaaggctgtcacatccttagagacacagaaaactccgccgacgtaacagcttctttctgaaggaatctgtgtacgctgatccacagatctcttcatgggtgtaattattaactttatgtgatgagtttttagttcccggcctgtatgatacggatattcacatatcctgaggtggctgtttacaggttaagaactattatggatatatgatagcatggccatatacatttgtaaaattgatatttcgtgtttataatatagaatattttaatatttatcaaacggataaaagcctctaccacacggtaaaatcctgtttttataaaacggtatagcctctggatttcaggcaggatctcacttccatgatatcctcggtatggaataccatgatcggcttgccggaatcacggttaaaggagaggtacagataatccacgctcacattactgtccttcagtgtaagaagcagatcattcagatttccagtcttatcctcaacctccactccgatcacctcgatcacgtggcagagatatcctgcagcgatcagagcctccattgccttatccggctccgaaactaccattcgtacgattccgtactctgcgctgtcattagtcacagagcccagaatgttgatatcctcgttcttcaggataccggtaatgttctgcataacaccctttttattttctgcatagatggataactgtttcagcatgataaaatcctctctttcctatgtgctttattttgctgttctatcgtatgataaatcttcgcacatcttatcaggtatgtcaaccagagcaagccggataataacacagaccttcatattttagtttacccggctccataaacactgatattttatgatcagcatttaacccggcccgcctgttcaccgcatgtgagcatggagatatttttcccgggtagcgatacctccccggatatgtcgctcctgcttgtttacatccagtaccttgcgaacttctatggccagagccggattgatcactttcaggcgttctacgcaatccttatgtaccgtactcttactgattccgaatttcttagctgcctgccgcaccgtagcctttgtttcaacaatatatcctgcgatctcaactgcacgttcttcaatataatccttcactgccaagcccccgaagacgcttttttacagtgtatgcggaggctttttcaggtatgagccctattctatgtaaagctccttataataatttaattctttttcgcctgcttataaagcacaagacagacgatcacaaacacaaccgtaaccgctacggtaagcggaaggatcatagaagagcccgccccgagcagaaggccaaatccctgtctcagcgtcaggattccaaagatggaaaaaataacaaatgcaactgtattgaggattccctccggtgccttgcttttcagaagatatccgatcagaagtccgatcacatccgctgcaaaaagtcccagtgaacaggcaagccataccacaaccgctgaactcagtccctcattggcaccaaatgtaattgcggtaagctgtgtcttatcccccagctccgcaacaaaaaatgtacagaatacagacagcggtgcaaatctgatcttacgatccttaacattctcttcctcatcatcgtcactcttcagcgttgtcaccgcaaaaaacaggaacgctgcacctgcgatcagacggatcaaccaggtagggaacacggtactgataatacctcctgcaagcactgccagtccgttgagcaccaggacagcaacaccggttccaagcaaaatatccttcagcttaaacctggaagtcattgccaccagcatcagctgtgttttgtcacccatttccgcaataaactgggtaaaaagcactttcataaataacagcatttttcttctcctttgcatattcatccgctctggagccataaaaaaagacccacgtatactctatctctgtaacagaaataaaatatacatgagtctcattctttaagatttgccaggtgcatgcaccagtatgttgacaaaccacgtctacacgcgaattactccctcacggaattgattttcgtcattgtagcaaagttgagaaattttgtcaagagcattagaaagctccgcctgtgctgtacaagagaaccggcgattcatgccgacaccactaaaaatccctgcctgcaccgccaccgccgaagcttcctccgtctccggagcttccgctgtcgtagctgtcataatcatcatctctgtcatcgtcattaccggaacttccgccgctgctttttccccctcttcccaggatccagctcagcggaaacagggaattaaagagccggtgcagtacattcatacggctgaaattctttttccagtagtctgcggtatcctttcccgacaatttcattatcaggcccttcagaatcagaaccatagttacgataagaaatacaggcagcatcacgcacagcagatatgcgcccaccatgagcaaaacgatcatcacaagccccagcgctatctcccagacagttccctcatcctcatcgtcgtccacatcctgctgcaccttctcatacctgggagctgttatcttctccaggccgtattcctcacggatctcatttagcagtgcataataaagctccacggtacctttttcaaactgattgtctttataggaaggaactgcatattcatccagaagtcgtccggtctttgaatcaggcagctttccctcaagaccgtagccaacagatacccagactttacggtccgaaaccgaaaggacgatcaggacaccattatttttcttctttgaaccaattccccatttgcgaccggtttccactgcataatcactgatgtcttccccatcggtggtatccacggtaaggacaaccagctgcgctgtggtatcctcataaagctgctcaccagccttgcaaagctcttccttccaggtatcgctgaaaacccctgcataatcattaacatagaattcttttgtggcagacgggatcttcccgaaagctgccagcgtacttccggatagcgtcaatacaaaagccagcagcacagccatccgtccgatccattttttcataggatattctccctctatccgttctttcatttcatcaaaacaatggtctgatcttatcactctgccagcatatcccctacatccagcgtatctgctgctgaatcatcggcctcaaaatatgacgccttctcaaagccaagcatggaaccaaatacattcccggggaatttcacaagccttgtgttataagctttcacagcctcattataatcttttctcgctacagagatccggttttcgcttccggacagttcatccatcaggcccacataagtagtattgcttttcagttccggataattttccaccacaaccttcagaccggaaagtgcactgtccatctgctgatctgcctcagatttctcttccacggtatctgcattcatcagctggtcccgcgcctccagaaccctgtcaacaacctccgtctcatgcttcgtgtaactttttaccgtgctgacgagattcgggatcagatctgcacgtctctgcagcatggtatccacatcagcctctgcagtttccacagcttctttacttccggcaagcccgttgtaactgagcataagtcctccggcaaggaccacgatcactgcaataacagccaaaaatactttcttcatctcttttcctcccttccggtatcacagataacctttcagcctgcgatacagaattttttatatccccattgtaccagagcatacaggattccaccagaaaaactcaccttttcggtcagaatttttctgccatttccataagtccctgatatattttttcggaaagcggaatggaaacaccaagtctcttcgcttctttcacaatatagccgctgaaggtttccagctccgtctgttttctccggatgcgaaaatctctctgcaaggagctggttgcattatctgcatgtacatggcggaatttatggatcacctcattgatgtgctcatccgtcagcgcaacccccttggcctgacctacactggcagcttcccatacaagcttctcatactgctgcgctttcaccggatctctgcggagctccccgatggtattatcataaaaagcagtcatcacattaaaggcacagttgaggatatacttcctccagatctccacctcgatatccccctgatccttatagtcaatatccgcacctttcaggatctctgccacttctgcaaccttcttctgctgccgttcatccgcatctttgattccaatacaaagccacgtaaacgtatcctgctgggaaatggaaaaatcctcattggcaaaagccaccgtatagatcagcgaatccacaaccgttcccttaccaaccagacggcggatgttttctcccggatccacaccattcatcaccggaatgatcactgtgtcatccgtgaccatgtcccggatactttcgcacacctcagccagtgaataattttttacacagataaaaatataatcctgctgtcccatatcccggatcggaaccacacgctccggctttgccacgatctcacccttataatcactgtggagcaccaggccttttttccggatgctctctgccctggcgccacgtgcaaccatcgtcacatgcggatacgccttcgccagcagcccggctatgtaaccgccaacaccaccaattccgatcactgcgatctttttctcttctgtattcatattttctgtttcctttcctgctgtttctccctgaaaacttacccgccccggaaaaaatgtggatattcgcggtccacattgacaaacagcatggatattcacaatccgcattcgctacctgctcattgtatcaaatattcccatacatttccagaaagcaattttcagtaatatcctgttcgaaaaaaatacagaaactttttatcccgtctttttttgtcgcggattctggtgtatactggatataaattttttacgaaaaaaataaaaatgtgaggtgacaaaaatggataccaaacccgtttttcacggaagtgatatagaaaagatctgcagctactataatctgaaaaaagaaaacatcgtcaaattcggtgcaaatgtcaatcctttgggactttccccaaaagccggcagagccattgcagaacacgtggatatcctttcctcctacccggacagagaatacacatcccttcggaatacgatttccagctactgcaatattcccgctgatttcatccttccgggaaacggctccagcgaattgatctcccttctgatccaggagcgtgccccgaagcatactctgatccttgggcctacctattctgaatactccagagagctctctttctccggaagtacccaggaatactaccaccttcaggaaagcaatgatttcgagccggacattccggatctctgccggaagctggagcagggctatgattttctcatcctctgcaaccccaacaatccaacctcctctgccatcacccaggaagagcttcgcagacttatcggtttctgtgcagaaaaaaatatcttcgtgatgatcgacgaaacctatgtggaatttgccccggatatcaacgccatcaccgcagttccgctgacacgggaattcaccaatctcatggtactccgcggcgtatccaaattcttcgctgctcccggaatgcgcctgggctacggcatcaccggaaatatggactttcttgcaaaaatgcgcgaaaaacagacaccatggtcacttaacagccttggtgcctttgcaggagagatcatgctgcaggatgaagattatattaaagaaaccagaaatctgatcctttccgaacgcgaccggataatccgggaactgcgggatacagacacctacaaaatctatcccgcctatgcaaactttatcctgctccggatcctgaaaaacggactgacctcctatgacgtatttgaagcctgcatcagacaaggcatgatgatccgtgactgttcttccttccagtgcctggacggggaatttgtacgattctgtattatgatgccggaggataattcacggcttgttaaagtgctgaaatcgctgtaaaagctgtacaatacgatccgggatttccggatcctctgttttatgtctccggtgcctgacagacatttctgtcaagcatttttttacctgcatatttttctgcaaagatcactccaatatggtgcactcatatatgcgcacttgtcattaatttattttttctaaatataaaaaagagttgtttccgaacagatgatcactcacacctgccatacaacagctcttttttcatttcatatcttcaaaatcaatccgtcattcaactatttgctcataacaaagcactttttcccaagtttatcaaattaaattcaacaccttcaacgcattactctccgtcacagccacaacctcctcgcagctaattcccttaatctccgcaatggtcttcacaacctccggcagatacagggagctgtttctttttccacggttcggcacaggtgccatataggggcagtcggtttcaagcaggatctgattcagcggcgcatactctgccacctctttcagcttccgggaattcttaaaagtaaccactccgccgattccaagataaagtcccatattcagatactctcttgcaatttccttactataggaaaagcaatggataactccgccgtacatcccatcctgcatatattctttcacaatattcagcgtatcctctgctgcatcacggctgtggatcataaacgggagctttttctcacgggcgatgtccatctgctggcggaataccttctgctggagaagatgctcctccttctccttatgccagtaataatccaggccgatctcacctacggctaccgtttttttcatgtcgcaatatctgcggatctcatccagcacagctgcatccaccttatccgcatcatccggatgaacacccactgcgccataaacaaaaggatacttctcaaccagatcataaacccggtcaaaatgtcccacagaagcacacacatccacaatatgcccgatcccattctcctgcaggctatccagcatgtcagaacgatcctcatcaaaagcttcatcatcgtaatgtgcatgagtatcaaaaatcatagctttatccacagtcatctcgtcaccgacggaaacttttccacctttcagcactcttgtaaacacaccttcccggggcatgatgcactcacccatcttctgaaaaatagcacagccattgtggcactcctttccgatctgagtcagctccagcacaacctcaccacagcgaaatctggtgccaaccggaagctttgcaaaatcaatcccttccacaaccagattctcaccaaaagcaccatcttcgacctctgcgcccttcgcacgaaacgcatcgatcttttcaccggaaagaagactcacctgccgatgccacttcccagcatgagcatccccctcaagcccccagtcctccataaaaaccgcagacccgacattcttcttctgtgttcctttcttctcactgatacaaaccgcaagtacttttcccatagcaaactcctattaatcacacatcattaccaaatttattcctatatcacaccagcaatattgatttccaaaacctaccacatgtaactctcaagcctcaggaattatgaatcgctggagatgaattttaatcataaaacctaccacatccaacagccagcccaacggaggcagggccagtacggtgacacgctgcgcggcctgttcggctgcgtcgctggtttgctgccattcgcgccaactcgcctgcggctcaaacagggcgctcggtggcagcagctatactcgcctctcgacggccgctccgctaacgtcaccgtactggccctgcctccgttgggcgtccgttcgttagtctaagtatacaccacacactaccgtccgcattctccagtctcgccagtcaaaatctcaatcccatgccccaacgcctcaataataacctccaggcactccctgacagccttagggctccccggcagattaacgatcaatgtccccttccggatcccggccgtagcccggctcagcatcgcccgcttcgtgatcgtcagactaaacgcccgcatcgcctccggaatccccggcacacgccgctcgatcacatcctccgtagcctccggtgtcacatccctctgagaaaacccggtaccacccgtagtcaggatcagctccgcaagccccagatctgcgatctcagtcatccggctcccaagcatcccacggtcatccggcaaaacatccacagaaacaacctcatacccggccgcctccataatctccttcacagcaggaccactaagatcctctcgctctcctctgtaccccttatcactagaagtgatcacagcaactctcttcatcactcaacctccgatctgagccatacaaagcttctccgtcttatcatccttctgtttctccagacctccgccaaaaacatgcccgtccggtttctccgccaaagcctccaggatcacagccttcagcacctcatccgaaccaccactgcggatcacctcccgaagatcccttcccgccgcatactgcagacaggtcttcaaaaagccctgagaagtcagccggatccggttacacttcccacagaacttatggctcaccgcgctgataaacccgatctttccggaaaaaccatccacatcataataatgacacggtccattcccaaggggctccccaacatacggcgaaaaccgcggaagcttttccccaaggatccgaagcagttcctcctccgacaccccatgaaattcttttcccatcccaatgggcatcatctcaataaaccgcacatgcaccctgtgatccctggcaaaaagcgccacccggcaaagatcctgctccgggatcccaagaggcacacaattgattttcagtgaaatctccggatacttcattgcctccgaaatcccttccagcgtccgccccagttcatcccgccgcgtgatcctcctgctgcaggcctcatccagcgtatccaggctgatattcaatccgtccagccccgcccgggcaaaatcactcatctgatctttcagaagcacaccatttgtagtcagagtcaccttctcgatccccggcatatttttcagtttttccaccagctgaggcatccgcggccgtacaagcggttccccgccggtcagcttgatcttccggatacccagctctgccatcacccggcagatcctcaaaatttcctcttcctgcaaaatgagggagcgctccacatgctgcactccctcctccggcatacaataaatacaccgcaaattacatctgtcagttacggaaatcctgagataatcaatatttcttccgcacctgtctatcattatttttcctcaaaacgaaaatctccgcttttgcctcctgttttttcttccagatggatatcagacatgaccatgtgcttgtcaattgccttgcacatgtcataaatggtaagaagcgccacctgaacacctgtcagcgcctccatctccacgcctgtttttccctctgtttttaccgtgcagaatacacggatcactcccgcatcctcatcggtctcaaaatccacagaacacttctggatgggaagtggatggcacatggggattagctcagaagtacgcttcacacccatgatacctgccacacgggccacaccaagtacatcaccctttttcacatttccgctttttaccgcggccatgatctccgggcttacctgaatggaacccgtggctgttgccgtacggtgagtgaccggtttgtcggacacatccaccataacagcattgccgtttttatcaaaatgattcaattccatatctgtctatacttagcagatctcagcgcctgcaggcatctctttctccggtaccatcagggaaagatttccgtctgcatcctctgcacagaggatcataccctcgctgaggattccggcaagcttggcaggcttcaggtttgtaacgaccataacctttttgcccaccatttcctctgcggaataatgagccttgattccggatacgatctgacgaacctggcttccgatcttaacctgagagcagagaagttttctggatttcttaacctcctcacaggcgatgatctcaccaacctggaactgcagcttctcaaaatcatcgaaagtgatctccggctttgcctcgatatcgatcacattctctgttttctcctcttctacctcttccttcggctcttctttcggctcttctttcttcggatgaagcttctcaaccttctcaagaacctctttcaggtcaagtctcgcaaaaagaatctccggtttgtcggttacgcggtttcctgaaggataaagaccaaactgctccatctcctcaagagttctctcgtttgcattgagctgtacaagaatacgctctgttgtacgcggcataaaggatttcagaagagatgcgccgatgcagattccctcaaccaggttgtagagaacggttgcaagacgatcctgctttgtctcatcctttgcaagtgcccatggcattgtctcgtcgatatatttgttgcagcgtttaaacagagagaatacctctgtgatagcatctgccacacgaagtttgtccatttttgcggaaacgttcttcggaacctgaaggatgaagctcttaagatcctcatcaaccggctcagtaacattcttattctcaacgactccgttaaaatatttgttagacatggaaattgtacggtttacaagatttccaagtgtgtttgcaaggtcggaattcagtctctcaaccatcagctcccatgtgatcacaccgtcattctcaaatggcatttcgtggagtacaaaataacggacagcatctacaccgaagaactcaaccagctcatctgcatagattacatttcctttggatttactcatttttccatcgccctgaagcagccatggatgtccgaatacctgtttcggaagcggaagatccagagacatcaggaagatcggccagtaaatggtatggaaacggatgatatcttttccgatcaggtgaagatctgccggccagtatttgttgaatttatcgctgctgtttccgtcgcagtcatagccgatacctgtgatatagtttgtcagggcatccagccatacatatacaacgtgcttcggatcgaaatctaccgggattccccatttaaaggatgttctggatacacagagatcctgaagtcccggaagaaggaagttgttcatcatctcgtttttacgggactccggctggatgaaatccggatgtgtgttgatgtagtcaataagcttgtctgcatatttactcattttgaagaaatatgcctcttccttggcaggtacgcatggacgtccacagtccggacatttgccgtctacaagctgggactctgtgaagaaggactcacatggtgtacagtacattccttcataatgacccttgtagatatctccctttgcatacatttttttgaagatttttttgacctgctcttcatggtctttatctgttgtacggatgaatttatcataggatgtgttcatcagatcccagatacgtttgatctcaccggaaacgttatctacgaattcctttggtgtaacaccagcctcctcagccttcagctcgatcttctggccatgctcatcagtacctgtctgaaaatatacgtcataaccctgctgtcttttaaaacgtgcgatcgcatccgcaagaacgacctcataggtatttccgatatgcggtttaccggatgtgtacgcaatggcagtgctgatataatatctctgcttttccatcttttctttcctccataaatataaaaataaaaaacgtcttctcataccataatgatatgagaagacgagttattacccgtgttaccacttcttttcgttcctgcctcgcggcaaaaacctcatcaggtacagcaagctctatacccttccgctataacaggcggtcctgtcactgcctaccgctgtccgttaaatcgggcattcgtacttcgcttatcgcgtttaaaccggttcagcaatgcctctccgaagccatcttccatctgcgcctgcacatccctctcagtctcggaactcctgcataaagtgaacctttaccattcactctgccacagatctatgacatcaactgcgtcacagcctgcatctaaaaagtcctccggggatttccctgtagtacggtgtacacatgtactctcttcttccatgagttttccatatgggaaaatcgtaacacatttccgatggtttgtaaacggggaatttcgatactgtattacattctcctctgcctgtacatccaccgccacgccatccggaacgcaatagttgtcagcgtcattcctgctgccatgctcaccgcaaaaaggatcgtatagattccgtctttctggaattttgcccagtccttcatcaacatccagttcattgtccggtaaagtgctgctcccggaatcaacggaattgtcgcagaaaccagaaatacagttaccggcgttttatgaattcttgccatacattctgcatacaaagtaatagctactgttgaccagaaaccgcacacatacggacttggcgttatgaactctactgccagatatacagcccaggacaggcatccacccaatgccgcaaaccagagtttttttccatggatattaaataatgccgcaaagccgagggatcctgtgaaggatacgaccagctgtatgatttcccgcatattttcctcctgaataaatcataactactatcaaatgctcccattatctgctgcatttcgctactccgcaattgatacagtatgtaaactcctcattcactgcttattgcttttcgtaaccttcaagagaacttccctgattcggttaaaacaacagattcgccaccgtaaaaccaaggcccacgaccagtgccagcaaaagtgcctccatacatcggatcaaacctgtaatggtatctcctgaaaacatatcacgcaatgaattggtaaatgcaattcccggtatcagaagcatgatatttccgatactgatcagatccgcatgatgtccaagcccgattagaactgtaagattggaaagtactccgccggctccgcagcaaagaagcactgtcagtagcgagtttaatgcacctttttttacaaaagcctcaaacagcttcagggcgataccaatcagcgcagaagcaatcatatcgttgacatctcctccaaaaaacacggaaaaagaacctgaaattacagcatagatcaaaatctgcgttttaaaagaatatccttgtttatcccggatcttttccagccccttctggatctcctccggcttcggccgatactcacagatgtatctggaaagctggttcaggtcatccagccgtcccagatcattggacattcccggcacacgccgcgtctgggtgcaaataccgaaatcctctccataaatagtcgtcacaatactggatgtgatagaaaaaacatctgcccgggtggctccatatgccaggcagatccgccgtatggtatcttccacacgtccaacctctgctccgcagcaaagaagctgttcaccaattgtcatcgcataatataaatactgttccgcttcctcccgcgtcatccggcatccctcactttcctgctttatttcatttttatctattttaggacacgtaaatattaaaatcaacaaggattttttgtcttaatattcattttttctatatttcctcaaagtaataagcagatattttcactcaaaataaaacaccacccggacaaaaaagatatctatcccttctgtccggatggtgtttgtgtttgaaaatccaatgctctgctcagtttttatttatttgaaatctaatagatcttatgcaagttttccgccaagttcacggcaagctgcaagtccttcatcatcaggtgtgttgtttacaatgagtccttcatcatcaacaagctctgcgcctgcgtcttttgctctgccgcaccatgttctcatccactctccgtcgccccagtcataggaaccgaaaagcgcaactttcttaccggaaagtttgccttccagatcagagaagaacggctcaaactcaccctcctcaagctcctcatcccccatagccggacaaccaagagccagaacatcaaaagaaagcgctttatccacatccgcatcagccacttccataatctcaacatccgcaccggcagccttggcaccttcctcaacagcctgcgccatagcctctgtgttacctgtagaagaccagtaaataattcctaccttgctcatcttaaaaacctcctgtttttaaactttatattatacgcacatctgagatgtacagagatgcttcataccaacaacctgcaaaatcgaataccccgcacggatctgcgccgcagtaaactcccggcacttatcgtagctgtcaaaaatcctgcgagcctgctccacatcatcataaaccttccagtaaccacacatcttgcagccactgcctccgaacttccggaagcccttcacgtcttcaatgggataacccaggaaaagtccgatctcatgaggaaactccgtcttatgaaaaaatctctccttcaaacgggcgatcatctcatccaaagaactatctatattatacccatcctgaagcaaaagtttcctggcttcatcctgcttaagatattcctgcagcatatccggccggtacaccagaagaagataatgcttcctgcatccacagatgatctccatacggataccttcccgttcaagactctcctcataatccgaaatgatctccggcagctccggcattttttccttggaaaaggaaacaagattcgccggtttcattcccattaatacaggggaacaatgataacccatgacagattcaaatttttcacaagtcatttgcattctcctttacatattagttagatttctctaactgttgtaaatatactaccaaagttagtctatgtcaacttatttttataaattttcaccgagaatttttactgataaaatcctatcattaagggcacaatattccttataacaaacactctgtcagacatccgactgccagttctcaccatttaaccgaatcaagtaagtcctctgcagggttgcaaatatcccctacacctgcagcgtaaaaatactcatttacatccaactcataaaatgaaaatatttcaggataatcatatccaaacctcttgacaaatctccctctgtcatgtattataatatcagtaataattactattactgataggaggaaacattatggcagcacttaaatacagccgtcagcgagagtccatcaaggaatttctgagatccagaacagatcatccaacggcagatacagtatacgagaatcttcgacagatctacccgaacatcagtctcggaactgtctaccgtaatctttctcttctcagtgacatcggtgagatccggaagctgaccaatttcggaagcgcggatcgctacgatggaagggtcgcaccacactcacatttcatgtgtaccagatgcaaccgggtgatcgatatgcagtcagacagccttaacggaattcttgaacaggcagctgcagaatttatccacggaaaagtctttgacgtagatgcaagcttctatgggatctgcaaggaatgcctgaaaaaagaagaaaaacaagcttgacaaaacaaagatcacatggtatcataaaatagtaataattactatttttaatttagaagaaacaaaaacaaacaatatatttcaaaaaagaaaaggagatcattactatggctaaatgggtatgtacagtatgtggatatgtttatgaaggcgagcaggcaccggaagcctgtccagtatgtaaagcaccagcttctaaattccagaaacaggaaggcgagctctcatgggcagctgagcatgttgtaggtgtagctaaaggcgttagcgaggacatccttgcagacctgagagcgaacttcgagggtgagtgctctgaggttggtatgtatcttgcaatggctagagttgctcacagagaaggatatccggaagttggtatgtactatgagaaagctgcttacgaggaagcagagcatgcagctaaattcgcagagctccttggtgaggttgtaacagacagcacagagaagaaccttcagatgcgtgtagaggctgaaaacggcgctacagcaggtaaattcgaccttgcaaaacgtgcgaaagcagctgaccttgacgcaatccatgacacagtacatgagatggctaaggacgaggcaagacacggaaaagcattcgctggtctgcttaagagatatttcggtaaataagaaatccgcataaaataaggattttttaagggggaatcacagaagtgattcccccttttttcgtacaatttttatttaactgtaactttacaggttgtcctctttgagccgcttcggattgtgatcgttgcgtttccttttttcagacctttgatcacaccaccggatgttactgtcacaatttttttgttggatgatgtgtatgtaactttttcctggctggttacaggagtgactttaactgaagatgccagtttacggtaagtagttccttttttgagtgtcacagatttagtgcttacagtaattttcgaagtttttactactcctctctgtacggtaactttaaaagatgctgactttttgcttgcaagaataaccttaactgtagtacttcctgcctttttacctgctgtcagtctgaaagctcccttctttgtcacagaagatacttttacgattcctgtatttccggatgtcactcttgtaacataatcacctttcgccagtccggctgctttaaatgcagtggtagactgacctgctttcattttcagggaagatgcagtcagggaaatcgtcggtttcagtttggcaactgtaatttgttttctgagcactttgccacatactttacaatgacttccttccttctttcctgctttaaatactgtcgctgcaactgctgcatcttttacagcggtatgttttgccggaagtgttacggttcttacaccatcacaggaagtacatttatcggttctgcttccttttgacgtacaggttgcctgaacagtttttactgctttccagctgtgactgtgttttgaactgttttctccaatctcaaaatgttttcttacaagccgctcccactccccgtttttgttttttcgcatggcagacagtgcaagccttgtattatcatcggactttctcgtcatgatcggaagctcctggccggaaactttctgcatgttccatgcttcatcatcgtaatcatattgcagtttaccggattctgtatccttccagctcatcactacgatttttatatcatttcctgtaatctcaacgggatcaccttttccgtttatatactgaaccagttttacttttaaattggcgagattaatggattctccaacagccggattaagcagctttccattcttatctgtcagattctccggtaacagcataaattcgctgacttcaaaccatatatcttttctgaaggcttctttatattcaccggttttatccagaagttttactgctacataacagcagccaacaccggttttatcgttggatttaattataagcttctttccatccggagaaactgtagcttctgccagttttgactgttctatgatttccagcttataatcttttaccggatgctggccactggttttatccagtatgtctgtcacaatggtcgtttcattgttcggcagcatggcttcatttcctgctgtgccttccaaatcgtatgtcagattataaaagcttttttcctcactatcatcactgtcatgaccactgtcaccgaagtttccactgtcatcgccattataaccgggcaaagtatccagctcatacatccgtcttgcaatctggtgccagtttccatctgcacttttttccattgcagtaagcccaaaatatgtaccatatcctgatgttctctcaaggattgggagctcctgccctggaacatcgatccatttccagacgtctgtatcataatcagggtacactgtgcctgtactttcatctgtccatgaagatattacgattttataattatctcctgttaccggaatcggatctccttttccatctttgtaacggacaagctgcggcttcatgtcttttgctatatccaactgctgacctacttcaaggttgatttcattaccacttgtatctgtgattttttccggcaggatcacatactcactgacgctgaaccacatatcttttctgaaggcttctctgtatccgccttttccatccggtatctgtacagatatgtaacagcagccctgaccggttttattgccagatttaataacaagtttttttccatctgcagaaactgaaatatctgccagctttgactgttccagaatttccagtttataatcatctactctctgataatcctttgttttgtcctccagataagtggtagctgtcatctgactgttcggcagcatggctccgtttcctgtcgtatcctgataatcatatatcagcctgtaggagcttttctcttcgctgtcatcgttatgaccattgtcaccgaagtttccactgtcatcgccattataaccgggcaaagtatccagctcatacatccgtcttgcaatctggtaccagtttccatctacacttttttccattgcagtaagcccaaaatatgtaccatatcctgatgttctctcaaggattgggagctcctgacctggaacatcaatccatttccagccgtctgtatcataatcatggtacactgtgcctgtactttcatctgtccatgaagatattacgattttataattatctcctgttaccggaatcggatctccttttccatctttgtaacggacaagctgcggcttcatgttatttacaatgtctacctgctggcctactttaggaataattacatttccatttgcatctgtgattttttccggcaggatcacatactcactgacgctgaaccacatatcttttctgaaggcttctctgtatccgccttttccatccggtatctgtacagatatgtaacagcagccctgaccggttttattgccagatttaataacaagtttttttccatctgcagaaactgaaatatctgccagctttgactgttccaggatttccagtttataatcatctactctctgataatcctttgttttgtcctccagataagtggtagctgtcatctgactgttcggcagcatggcttcatttcctgtcgtatcctgataatcatataccagtctgtaggagcttttctcttcgctgtcatcgttatgaccattgtcataatcgttgctgatcaaagaagtaagttcataatgatgtcgggtaatataatgccagtctccattttctgatctctccatagccaaaagtgcaaaccatgtagaattctctgttgttctctccaggattggaagatcctgtcccggaacctctatccatttcaggccatctgcatcataatcacgaaattcttcacctccaggacctgtctgtgacatgacgatcttgtaattgtcccctgttaacggaattgggtctccttttccatctttgtaacggacaagctgtggtttcatgtcttttgctatatccagctgctgacctacttcaaggttgatttcattaccacttgtatctgtgattttttccggcaggatcacatactcactgatgttaacccaaaattccctttttgccacttcagttccatttatgaatgccgttgcggaaattctggcgtctccggttttattgtaaacatccagcacaatatcctggccatctaatgatacgtctgccattttggcaccatttccacccgttaccggagcaactttcaattcatatgcagaaacatcactatagccaattgtatcaaccagacgggattttattctgacacggctgttcggcagtaaatcctggcctccactggcaccttcaaatatcagattaagctgatattgttcatttgctgcggcagactctccagcttctgaaccgtcactgaaggcctcctggttttcggtgttatccccgaatagctccgtaatttctgatgtgttttcttcttctgcaatttcttcttccgcattctctgcatcatcctgaagacttaattcctcctcgtcttccagatcaggcactgaagctacttcccctgttgtttccgaaccaccgttcttctgaactatttcttctgtctctgcagtttcctgtccggtatctgctgtcagttcctcagctgctaccggtatgaccgcgcccatactctgtgaaaacgtaagtgttgcgaccaaaagcattgcaatcctctttttcttcatatgattctcccattttcgttttttctgccataattatactatattcactgaagcactggctatcatattcttccttctactggtttaaaaaaatatattcctaaaaaatcacccagtgtgctaatataaagcaaataaaaacattccaaaaagccttgaaataccagcactcagagatgttctgaaatcaccaaaaaaggaaccggtctcccggttccttttttcgtcatctctacatactatatccatccagatataccgatgatacataatttttgctggtattcttatacaatatctgcagataatgttctccatccaaaatgactgtgcttccatttttgatctttctctgtcttccggttccgtgttcactgtaatagattgcaactatcttgtagcccttctttgcagtgatacatacttttgcctttctgggataaccttttgcaaccgggaccatggtctttttatcaaaggattttttataatcttttcttccgaatttgcacacgtttaacggatttgaataattatgtaccgtaactttagatttgaaagaatatgtttttccattctttctttttactttgaaggatacaatagaagttcctgttttttttgccttcagcgtaatggtataatcatccagaaacggcatttttttaactgataccacactggtattactggatttcagtcccagaactttgtcggatctgacggagtttatgattccatatccgatttcctcacctttcataagagcaacagacttagtaaatttgagtgtacccgccgcctgcgctgtgaccggtgctactgcaagatctgtcacgataaatgtaagtgccagaaataacaccaataatctctttactgcttttttcattactttttcccccttttataagcattttggacttattccatacatattagtatacatgagttattcatattcaacaaccttttttctgaattttctgtacactatcttcccgaacctttgcgcgaagctctgtcagatattctgagaatttcacctgttcatttccgtaagtcatctgcagatcatactccagcggaatccaggttttaatatcagattcattgtgctggatcagggcttccagcttgtccagagctttatagatcctagcctccagagtctgctgctcttccatttcctgataaagctcagccatttctttatcaaagggctccggcagagtcttcacccattttcccagcacatcggcttctttctccgaatccttatccgttttttcaaaggccgggatatcaccggtaaaagcttctcccagatcatggatcaggcacattttcataattttcagaagatctgcctcaggaaactcatcactgacaaaatatgccatcaacgtgatcctccaggaatgctctgcaacgctctcccgcctgccaccggaagtataactatgacgtaccgcatcctttaaccgttctgcaacggaaagtacttcgatcagtttttctggtttcatatataatattatgctcctttccctgctattacagcagctatcctaaatcaccatttccagcctatcttatatagctgtccataaaaccgttatagcgttttcactttactataccataatttcccaaagaacagacccccaaaaaacattctccttacttctgcgcgctgacatttcccatcccaaataaatttgtccaagctaatttctaaaaaaactataaaccatattgcatttttctccataatcgtcataatgaaattataaacaaaagaaagaaggtgattgccgatggatatcacggtgtcggatgaggtctcacaggaatatcatgcgcttgtgaagaacatcctctgtaacagagagttcctgaagctgagcctgtacacccaccaccagtggaccacacggctcatgcacagtatcaatgtttcttacctctcctggttcattgccaggaagctgggatgtgacgagaaagccgccgcaagggcaggacttctccacgatttctgtccctatgacttcaaggcggagacaccgaccggtgagcatcaggcgttttatcacccgaaggctgccgcagacaacagtgccgcacactttgatgtcacagacaaagagctggatgcgatactctcacatatgttccctctgggacctcttccacgcaacagagaagcctggatcatcagctttgccgataaagcctgcgccatcgcggaaggctgccatatcgccattgcactggccaggcggaaccggatcgtcatcaatccggcataatttccacacaaaaaaaacagggccgtcgccacttctgacgcgccctgtttttgtgtggaaattattttatggtaatactttgcagattactttctatatcttagttctctttcacaataaccttatccagatgccagatatcatctacatactcctggatagttctgtcggatgtgaacttaccgctgcatgctgtattgagaagtgccatcttagcccagcgtttctcatccttatatgcttcctcaacacgcttctgtgcctctgcataggaacggaagtcgccaaggatgaagtactggtcaggtctcggcatgttgcgtttgtcgagaagtgaattgtagatgtcacggaacatctctgtatcgctggagaaggttccgttgatcagctgcatcagtacctgacggatctccggatctgtgttgtagatgaagtccggatcgtaaccgccgttgttctcatagttgatgatctggtcggagctcataccgaagataaatgcattctcctcgccaacctcctgtacaatctcaacgttagcaccatccatggttccaagtgtcggagcaccattcagcatgaatttcatgttacctgtaccggaagcctctttacttgctgtggagatctgctcggaaacatctgctgccgcaaaaatgatctcagcgttggatacacggtagttctcgatgaatacaaccttcagcttgccgttgatggaagcatcattgtttacaacatctgccacacagttgatcagcttgatgatcttctttgcacgtgcgtaagctgcggaagcttttgcaccaaagataaatgttcttggatagaaatccatctccggatgtgccttgatctggttgtacagatagatcacatgcaggatgttaagaagctgacgtttgtactcatgaagtctcttaacctggatatcgaagatagagtgcgggtcaacctcaacaccattgtgctccaggatatattttgcaagacgctctttgttcttgaacttgatggtcatgaactcctgaagagccttctcatcgtctgcgtaaactttaagcttggaaagctgggaaagatctgtgatccagtccggtccgatcttgtccgttacccagtcagccagaagcgggtttccatgagcaaggaaacgtctctgtgtgataccgtttgttttgttgttgaacttctcaggcatcatctcatagaaatccttcagctcctgattcttgaggatctcggtatgaaggcgtgcaacaccgtttacagagtagcctgcaacgatcgcaaggtgagccatcttaacctgtccgtcatagatgatcgccatcttcttgatcttctcgaagtttccaggatatttctgctggatctcaagaatgaaacgacggttgatctcctcgatgatctggtatacacgcggaagcagtctggagaacagctcgatcggccatttctcaagtgcctcggacatgatggtgtggttggtgtaagcacagcattttgttgtgatatcccatgcctgatcccagccaagaccttcctcatcgataagaatacgcatcagctctgcaactgcaactgtcggatgagtatcattcatctggaatacaaccttctcatgaagcttggtaatgtcatcgtgtgttttcttatatttggcaatcgctgcctgaaggctggcagatacgaagaagtactgctgtttcagacgaagctctttacctgccatatggttatcattcggataaagtacctcaacgatagtacgtgcaaggttctcctgctctactgcgttgtgataatcacccttgtcaaaagagtcaaggttgaagtctacgatcggctctgcatcccagatacgaagtgtgtttacaacatcgttgttataacctgtgatcggcatatcgtaaggaacagccttaactgcctgatatccttcatggatgaatttattctcgttcttcaccggatcccactcaacgcgtacatatccgccgaaatgaacctcttttgcatactccggacgacggagctcgaaaggatagccgttcttcagccagttatccggtgcctctacctgataaccgtcacggatctcctgcttgaacataccataacggtaacggattccgcatccgtatgcacagtagttgagagttgcaagagaatccaggaagcatgctgccagtcttccgagtccaccgtttccaagagccggatccggctcctggtcttcgatgcagttaatgtcaagtccaagctcctcaagagcctccttaacctcgccgtatgcaccaaggttgatcaggttgtttccaagggcacggcccataaggaactccatggacatataatatacgatcttcggatcctgtttttcatacgccttctggctcttgagccagttgtcaatgatcacgtccttcacagtgtagcttacagcctgaaagatctgctcctgtgtagcctcttccagtgtttttcgataaaggaattttacgttttcttttacactttttttgaattcctctttctcaaactgcttgtcaatcattagttttcctcctgtactttggatactcccagtgttacagcctctttattgatgttccactccttggtgtaaccctctgcttctcccagaataatgttttctgccagtacttcacgtttgatctcatcctggtttgctttcatgatatccatgatcttatcgttatcttttgcatagacaatgatcttgtccatgacttcgaaaccagcctctttacgcatagtctgaaccttgctgatgatctcgcggacaaagccctcctggatcagttcgggtgtaaggtttgtatcaaggacaacggatgtctcaccgtctgtctctgtcacatagccctcgctctgggctgtttcgatcaataagtcttcctctgcaagctcgactctgtttccgtcaatgtcaagaacgagaacaccattatctctcagctctttcattgctgcggttccgtcgatctcggagagtgcgttacggatgccgttcagaagcttgccgtatttcggtcctactgtacgaagctgcggcttgaagctgtaggaaatgaaggactctacatcatctgcgaatttcacttcttttacgttaagctcatctgcgatgatatctgtgtagaatttatccatagctttctcagcctttacatacatggttccgatcggctgacggttcttgatgtttgcggtatttctgcatgcacgtccgagaacaacgatctcaagaagctcttccatgtttgcctcaagatccttgtcgatccatgcctcgtttacctccgggtaatcgcaaagatggatactctccggagcatctgcatcaatgcttcttacaaggttctggtagatatcctcagtcatgaacgggatcatcggagctgcagcctttgcaactgttaccagtgctgtgtaaagtgtcatgtaagcattgatcttatcctgctccatgcccttagcccagaaacgttcacggcttcttcttacataccagttactcatatcatcaacaaattcctgaagtgctcttgcagcctccggaatcttgtaggaaccaagatctgcatcgacagtcttcaccatggtattcagcttgctgagcagccatttatccataaccggaagcttatcgtaatttaaagtatatttagttgcatcaaaattgtcaatgttcgcatacagtacgaagaatgcgtaggtgttccacagagtgctcatgaactttctctgtccctctacaactgccttgccatggaaacggttcggaagccatggagcactgttgatgtagaaataccagcggatcgcatctgcgccgtatttgttcagtgcatcaaacggatctactgcatttcccttggacttactcatcttctgtccgttctcatcctgtacatgtcccagaacgattacattcttatacggagccttgttgaaaagcagtgtggactcagcaagaagggagtagaaccatcctcttgtctggtcaacagcctcggagatgaagtctgccgggaactgctgctcaaacaggtctttattctcaaatggataatgatgctgtgcaaaaggcattgctccggaatcgaaccagcagtcgattacctccggtacacgatgcatggtcttgccgcaatccggacacttcatggtgatatcatcaatgtatggacggtgaagctcgatggtcttcgcacgctcgtcaccactcttctcatagagatcctggcggcttcctacggattccatatgtccgcactcacactgccagatattcagtggtgttccccagtaacggtttctggaaataccccagtcctgaacgttctcaagccagtcaccgaaacgtcccttaccgatgctctccggaatccagttgatagtattgttgttacggatcagatcatcctttactgcagtcatcttgatgaaccaagactcacgtgcatagtagataagcggtgtgtcacatctccagcagtgcggataatcatgctcgaatttcggcgcgtcaaaaagcttgccctctttgtcaaggtctgtgagaaccatcgggtccgctttctttacgaatacgcctgcgtatggtgtctctttggtcatgttgccctgtccgtctacgaactgtacgaacggaaggtcatactcacgtccgacacggctgtcatcctcaccaaatgcaggagcgatatgaacgataccggtaccatcactcatggtaacgtagttgtcacaggttacgaaatgagcttttttgcgctgttttgctgctgcctctcctgtacatgcaaaaagcggctcatattctctgcgctcaaggtctgttcctttatatttctcaagaatctcatatgcaggctcatcatcctttgcaagcttgccaagaaccttgtccagaagtgcctctgccatgtagtaggtgtagccgtctgctgcttttaccttgcagtagatctcatccgggtttacacaaagtgcaacgttggatggaagtgtccatggtgttgttgtccatgccaggaagtatgcgtcctcaccaacaaccttgaaacgtacgatcgcagagcgctctttaacagtcttgtagccctgagaaacctcctgtgcggaaagcggagttccacagcgtgggcaataaggaacgatcttaaagcctttataaaggagacctttttcccagatctctttcagcgcccaccactcagactcgatgaaattgttgtcgtatgttacatacggatgctccatgtcagcccagaaaccaacggtagaggagaaatcctcccacattcccttgtatttccatacgctctccttacactgctgaatgaacggctccattccgtactcctcgatctgctccttgccgtcaaggccaagcttcttctcaacctcaagctcaaccggaagtccgtgagtatcccatcctgcttttctcggaaccatgtaccccttcattgtacggtatctcgggatcatatccttgataactcgtgtcagaacgtgtccgatatgtggcttaccatttgcggtaggcggtccgtcatagaatgtgtatgtctcgccctctttacggctgtccatactcttttcgaaaatcttgttgtctttccagaatttctcaacttctttttcacggtcaacaaaattcagattcgtgtcaactttacgatacacaatatttacctcctgtgtctgattactggctgctgcctcatctgtaaggccacagcggattgtttcttcacagatacctgttcgtgccaatgcttcgggcacttataaaaaaagaccccatcctgtaaaaggacgaagtctgattcgctgtaccacctgttacattatacgggcctgtgtccggatccctgcgtcttctgctgtgttcttatgctctgtgttatggcgcaggctgttgttccatgtctgttcatggcggacaattctttgtatctgccgatatatgttccctgtaacggaggaaatccgtcagttcttacttaatgatcatctgtatatcagatattcttccggctgctgccggacaacttcggaactgaagctcaggagtgatattccgccatatttactcgtcccaggctcccaccatccccagttcgctgcaagctttccatatggcctactgtctccatcacagctttttctatatacgctgtctattataggttggggaaaatccatatgtcaagtgttttcatggatttttcttattatatgtatgttcacttcttcttaatggaattttcacagactgcaagtggtttttccgggaggaaagtggtatactactacagaatcttgagggcaaaaatacagcgtttcattaatacaatgctataattaatgaaatactgcacctcatcacaaaacgggcaagattttttcggttactgattctcaaatgaataataaccttctcgcccggatttatcactgaaaggtatcttgttatgaaaaatatgaaaaaacgatccttgcgtcggatctttgcaggcattctcggcatagggatcctgctcacaggcgcagctccctgcgcggcggctgcctatggatacgatgaatatggtgatcctatcgtcactgccacaccggttcctgatggtcaggccgcagcagtcacgcctgctcactccagctattattcacaggctgccgacaccgattccattgacgggtggcccaaaggtcccggcatcgaagcacaggctgcagtccttatggacgtaaatacagaagccgttctttattccaaaaatgcggacacacagctctaccctgccagcatcacgaagatcctgactacactgcttgcctgtgaaaatctgaatgctaagacaaacattaccgtatctgaaaaagcttccaccagtgtaactgccggagattccagtatttatgctgctcccggtgaaaaattcaccagggatcaggccctgatggctgtcatgctccagtccgctaatgaaatgtctgtcgccgttgcggaagaagtttctggctctgtaaagaaattcgcagaactcatgaactggcgcgccaagctttttggctgcaagaacacacactttaacaatcccaacggtcttccggatgagaatcattacaccacagcctccgacatggcaaagatcgccaaatccgcctggctgaatcctcttttccggcgatactgcaccaaacgttattacgagatcccgcctaccaataaatttgcagaagcccgccagctgctcaatcatcacaagatgatgaaaaacggcgaatattattatgaaggcgtccgtggcggaaaaacaggctacacggatgcatccggcaacacacttgtcacctactgcaaacgaggaaatataacgctggtagccgtgatcctgaattctacttccgcggcaaatgcttacagcgataccgcttctctttttaattatggttttgaaaattttgaaaaagtggatatgaaggtgtccatggagccagtcccgtttaaggtactcccttgtgacaaatatatccttaagaataacggaaacacctatccgttttattatcagacaaaggtttatgtgactcttccaaaaggtatcaaaaaatcacagcttaacaaacgccaggccgttcttcagaatgctgtcggcccactgcgtctgaaaagcaaatattattataagaaacaaatggtcggatggggaatgcaatacgaacgaaacatcgtatcagatcttctcctgacttcgtaacattttcctgcggcggagagattcgtgcttttcacggatctcatccgccgcttctgtatcttctgctctcagggtcttcaccccgaaatattttccctcatcggtttttcggatccggatctttccggcaacaggtccatgctcatggcaaagggcaaggctgtaatataccttggaattgttggtactgaaccagcggatcttcctcttggcagggcatctgcaaatgggacacatggtacttaccatggtacggtccttcatcagacgctcctttgatacaaattccctggacacaaacttgtcatggtctgtataggaaatatagatctcgctgtctctggattttggattctgatatacatctagggacggatggcggatcatgcaggcttcatcaatctccagaagtatcctggcagtatagctggcgtctgccagtgcccggtgaaaatcccggtttttgggaagctgcaggtagtctgtagcatattccagggaacgcctggatattccatcctcgaattttatgctgaaaagtttctgcacatcatagtaatgcaccggtcctggcatcagcttcaaaagattatagtatttcatattgcgctgaagttccatcacatcctggtctccccaggtaaaaaagcgatactcctccccgcaccattccagaaatctgcggatcgcccttggaaaagggatgcctttttccagttcatgataatccacgtggatcacttcatggatactgtcgtggatccagtggtacactttgggcttgatcaggcactgaaaggtatcaacgatctctcttttttcatttaattttactgccccgatctctatgatctcaaacgggagccgactatccggatgtcttcttccatccggattctggttccattccaggtcaaatacaatatagttcatgggttttctgtcctcttatctgactgctcagctgcttcatagatgcagctgtttccggatcgttgtccggctatttcatatttttgcattcggacacagaataaatcgcttcaaacagctcctgctggaagctttctgtatctgcatctgtcagaatcatatctttcatttcgtcttcttcgtgtagccaccagcggaaatcgcataatgtggcacctcgtccggcaccgtctgaacaatccacatccaggaatactttttctgttttaaagaactccggatggatgagatacataaacggtacagcagcatggatacttgccacgcagcgatatttagaaaaattttcaagtacgtagccagccatatctccacaggctctggctgccggatcaccggactggcacagcttcatgatctggtttctggtgagattacatttcagggtagcatccagtccacacatgatcagtgggattccggaatcgaatacgatctttgccgcctccggatctgcgtagatgttgaattccgctgccggtgtgatgtttccgccttttgctgcgccgcctgtaaatacgatttttctgatcttattctttatttcaggaaaaaccttcaacagaagtgcaagattagtcattggtgcagtttcgatcattactacctgctcgccctccggaatggcattcagaatgtcacggataaaaagcactgcattgtcagaagcagcctctgattttgcttccggcagtacgcaatgaccaagccctgtctctccgtgaaattcttccgcataaattgccgctttcacaagaggacggtcctggcctcctgccaccggaaccttcagtccgtaaaaatccaccagctccagtgcattttgggtcactctttctatcctggtacttcctgcagatgtcgtcactgcaagcagctccagttcatcctgatgtgctgccgcatatgccagtgcgatcccgtcatcgattccgggatcacagtccatgataaccttgatcttatctcccatatattcacctctgtaaaaactctttccccaattttatagtattgccgaatttccgctgtttacctgttccaagtataacagagtgaggaaagagtgtaaagttaatcagaattcgttactgttcactccgttctcagcaacacgcttcgcggaatattaccagtaaacagtaatcagaattcacctctgtacttcaggctgaaacgtaaagaacccctctgccggacattggcagaggggtggaaaaaagggggttatattcatttatataaacaaatgcaatgtgcaatttggagctttaatatttgcaatatccgtttgggttgttccggatattgttattatgctatatcccatcacccggagcttgcaatccagtaccggggcttcacaataaatgctgatcaatcaatagaaacaaatttcttctcttctgcttctttcttggtctcttctttcgggaaggttacatgaaggattccgttctcatatttcgcatggatatcttcatgcttaatgctcgagcctacataaaagcttctgttgcaggttcctgtataacgttctctgcgaacatatttacctttatcatccttctcgtccttcttctcttctctggttgcctgaatgttcagataaccattcttcagctggatcttcacatcctctttcttaaatcccggaagatcgatctccagttcataattgccatctacatcaaggatatctgtcttcatcatatccttcacctgaggataagcattggcagctgcctgacggcctgtcggatatcccataaaatcatcaaataaatcttctccgaaaatacttggcattaacataactcattcctcctgatctatattcgctgcgtgctgcgcaggcgtttttaatttactgtttctgaaaacatctgcaaattctgtaagaactttctccggaagatttcttttttctctcttcctttgttctgtatgtactataacacgcattattagcactgtcaagaggcgagtgctaatttcacactttcttcacatttcacgtaattttacgatccatttttccgatacatatgtctgaagcgccgaagatagacggactcccaggatcagaaatggaactgcctgtaaaaacactcccataaatacataaatataataactgctttcataaaagagagcccacgtctgctgaatacaggaaagaacatctgtatcgggaccatggattccgtattcagtgcagtggagatatgcttcatgagatctgtcgaataatacatctgatcgataccgggacggtaataaggcaggctaccgcaccagataacatgactgcaacatcctggaataggaactgggaattaagaatgatctctaggctatattgctgtgtctgaatgtatgaaaataataaaatagttcctccaagataagcaaacagcaacgtatttaccgttgtaccgataatttctttcccaacctgatagccggaagctgtaagctctttcgctgtcagactgtttttatgagtccagacttcatatacagaagatgttacagataatgctgtatcgataacagccccaagagtactgaaaacagttacaaatattcctacatgaagcatgttaatatgaaggtccgtactgtaataatacataaaatcatcttctgaaatctggatctcatttaatccgtagcttcctgatctccatgtaataatataaatcggaataaacaaaagtaacattaccagcagtgtagccagaaaagccgcccgcgtctttggattatttccgttctgataaaacagagaaatataacagacacctgcacctgccaccaatatcaggagcagtacaggaaaaccggcagacatcagcataattgaaaaaaacaaaattacaatattccccgccagtgtcataattgacatggctccacgctctccgccaatcaagatcaccagaaaaattaaaatcaatacaagaaaaatgatcattctctgacaccccttttccgtgatggtattttcataatcgctgaagcaataaaaacagataccggtattgccagtacaattccaatactttctatcagaaaacgacagatatcatatggaatgtggtatctcacgatcgttataaaacttatatcattattcatcttaagtatgaacatgggaatcatgccgcttgccagaacaaacagcagtacatttatcatggttcccataatatcatatccgatttcacgaccggaatgtatcagtcttctcagagaaaccgatggatttttccgcacgatctctcctactgctgcgctgatcgtcaccgtcacatccataattgcaccaagtcctgtcagcataatatctgcccagaatatatctgctgaattgcctgtacttccaaggtattccagattggaataatccagatctccgtacatataaatagaaaattcaaacaatgccatgatcagaaacagaacacacagtgttgaaagaactgaggaaaatgtttttctatgaattccatttaagcagatcaatgtagtcagtgaaaaaagacctgcgatgacattacagatatttaaaatatttttcccttctgtaaaagcctgaaatccatacgcaaatatgactgtattcagtatcagtgatatgatcgtgtaaaatccctgctttcctgtaatgcagatcagcagaaaaaataatcctcctgccagtaatgccaaatacccatccctttttacagaacgtatcgtttttccggggctttcctttgaaccgcttaaaagaacggtgtctcctttatgatatttcttggtctgaacctgagaagatgtatattcattagagaccgttattttttcccctttatgcgaaccgtttaatatccgtgccgtaatattctgagtatagtaatattcttttgagcccctggttccttctctgctcagagtctgtttttctgttacggaacatatttttgccagcggtgtatgataaaatcgggaattacagcaggtaaacagaacaaaaataatatatatgccggctaaaagatattttttgtgaaatatgcaggatttcattaacttcattccccctgtagaaatattgcaattgtaaacgcactgaccggttgctttttatcgaagtaacattctacgctttttgaaagtattggtcaatataaggtatacaaaaaacagcagcagaaccgttttcacagttctgctgcccccataattattttaacaaatacctaactccaaaaaagccattatttacaaagcgcagaaaatgcatctgcaacaaactgaaccttggttccgataataacctgtacagaagtttttccaggtttgatcacgcctgcaacacctgcagatttgatcaccttatcatttacagctgtaatatccttaacctcaagtctcagtcttgtgatgcagttatcgatgcttgtgatgttctcttttccgccacagccttcaaggatctttgcggcaatagcagtatagtcatcatttgcaagctcaatattcttctctgcctcaagatcatcatcgtcttctcttcccggagtcttcagatcaaatttcttgatggcaaaaaggaatacaacatagaatacgataaatgctgcaattccaagaggaaggatgagccatgtcttctgtgctgccggaagtgaggatgagaaaagtaaatccatcgcaccggcggagaagctgaagcctgcacggaatccaagagcaactgtgatcatggtaaagataccgtaaagtaatgcataaattacataaaggccaggagcaaggaacataaatccaaactcgaacggctcagttacaccacagataaatgcacagatcgctgcagatgcaacaagaccgatggcaacttttttctttgcaggtttcgcacatcttaccattgcaagtgctgcaccaggaataccaaacatcatacatgggaagaatccggacatgtacattccaaggctccaggatacatctgcagaggtttcacctgcccagaagtgctgaagatcaccaagtccgatggtgtcaaaccagaatacattgttcagtgcgtgatgtaatccggtagggatcagcagacggttcaggaatgcatagatacctgcaccaacaacatccatacctgcaactgcttttcctaatgctacaagtgcactgaaaagtaatggccacacaaacagtaatacagcagatacgataatggaaaccactcctgcgatgatcgctacgcagcgcttgccgctgaagaatgacagccagtcaggaagcttggtgctcttgaatttgttatagcatgtagatccgatgataccggcaaggattccgataaaaggattcgcaattttgtcaaatgcaagagtctttgttgcattgtcagcgattgatggcatgatggttgtaacaaatcctgtagaaagaagtgttgtgagcatcagccaggatgcaagtgcagcaattccgccggttccgtcattcttttctgacataccgacaccgacaccgatagcaaaaaggattgccatgttgtcgatcagagctccgcctgccttaaccagaaacagaccgatcagattggctgcgccatgaatgtctccaccctgcatagttgccggacataaccagtatccgatacccatgaggataccacagattggcagtactgccaccggaagcattaacgcttttcccagtttttgaagaaatttcatatatttcccctcccttaaaataaatatatttgaccggatcactccggttataacaccccgaaaattgctactatctccgggctgctataagcctgtcagctgcatgaagatgatcatgaaagcttgaggacggcttcatccgccgaaacatccccctccttctggaggcttatctttccgtaatcatctgtgttgcagatcagaaccgggataatcgtgtttaaaccggctttctcaattttgtccagatcagcctctatcagaagatcaccttttttgaccttgtcacctgctgcaacgtgggctttaaagggttcgcccttaagtgtgactgtatccagtccgatatgtatcagtatttctgcgccctgagtgcttgtcagcgtaactgcatgaagcgtatcaaataccattgccacctcaccgtctgccggagcatatatcctgccgtctgccgggatcactgcaaaaccgtcacccagtaccttgtccgcaaagacagggtccggaacctccgcaaggggaaccactctacccttgcagggtgcatagattaaatttcctttatcttttcctttaaaaaatttcagcatattctcttcctcccgttatttcaccacttcttccggtattgatatccgcgatgtcgatttgtaaatatgtctatatattttttatccgttccgggtttatattatatatttcgtataattttcattttttgatttttaggcatgtgtatatattaaccattattttcggttttgtccacatttttatcggtatttttcaaaaaaataagctgtagcacattaacgcgacagcttatgtgagaatattcagtttacttcagcagttctttttctttcatattcgttgtcacctgaaactctccgttgatccgttggatctcgtataccaggggattatttctggcccagccgggatctttttctgcctgccggttccagctgtaccaggcgcggacaaagccttcgtggatggtagattccgcttcctggcgggcctggaccgcatcctgataatccacaaaagttccgatataaaatcgtttccccttgaatccgatggtagcacggtattttccattccgcagctgatagacgccacggaatccgctggtattatcactgcggtgctttcttttttccagcatctccacacaggttccatctaccatatgcagctgcccgggaagttccttccatatctcctgtctcagacagccacagcttctgtaattaccatgaagaaggccatcctctgtcacatccacttcatttccgcagtcacaccgacaatgccagaacacagagccctttttgctccttttatctgtatgatagagagcagtcagccgcccgaaacgctgtccgctgatgtcggtgatcccgcgacctctgacataatggccgcaaccgcagctggtacattttccggctttcaggctgtgtgcagtggaaatatgcatattcccgcagtcacagcgacattcccacctggtcctgccgtttttactttccagtttttttactgccacaagtttcccgaaacgccggcctgtaaggtcttctgccaccggtcctctcttggcactgttttccggaatacatccacagtcctttacagtcccacgcatcagatgtctggtatttacttttatctcatttccacaatcacatctgcacagccatacaacatacctgttttcccgctcatccagttttttcagtaccgtcagatgaccaaatctctgaccttccagtttaagtccgtttgccatcctctgtccctcacatttcgtcaaaaaaagcgatgcggtagaaatttttcctgccgcaccgctgtccggatcctgttatttatccgttttcttttttcttctgacaaatactgctgccagtaataccacacatccggaaacgcagatcactgcgatccattttgcaatgtttgtgttatctcctgtttttggcatagcttttacatgactggaaccagtatttcctgcataggaagaagttcccgtataggaagaagttccggaagcaggcggattgctgtcaggttttatcggcgtgttcgttatggtcgctgccggagttctggtcggcactgcagtcggagttttttccggaagtggtgtcggtgtattttccggtacaggtgtcggcgtatccacaggatcgtaggaattcacaaagccgatatcctgtttctcgctgttcatctgtgcatcggtatgtgcaaccacaactgcttccagatcaccggactctccgttcgttactgttactttcacataataaacggtattgtcataatgtccgttttccagctttccaggctgctgggaaacgctgtaagtgtatacgccaggaacagcatattccactgcaggaaattctgctttccccgcacctgtgatcgtgatcgtattttcttccggcatgggtgcttcgtcctcaccctgaagaatgatcgtataagtttcgtccggagatggcttctcacctgacaattccacgctgacaggaatctttacttccgcaactccagctgccatagctgaaatcggaaaaactgtcaggcacagaaccgcaagcaggagcactgccggaaattttcgtatattcgtcttcatcccctccttacgtctccggcgaataaggtttcattaccgccagaagaactgttcttgcatctgtaaattccgaagagcaggttgacattgccagtatctgggaaaaatcttcggactttccaatgttgtccatcgtctgctgatggacatgttccgcgttttttctgacaaaatccacaagtccgctggtgtccgcctgccattttcccgttgcaaaaatagaatcctcagatgcggaaacctgcatacatgcaaagatttccagcttgtaggaacggtcaggcagaatcagtgtacctgtagtgtttttgtcaaaaaatttcttttttctgtaaagatccagatctccgaacatcttatgctctgccatgtgatgaccatacagaagagaatatttcccctgaaaattcctgtcacagccggaatccagaaagatgcttcctgacaaagcaaaatcaccgtatacatcggtattgatgtaagtcaggttatcttctccctgaaggatcggatagtcgatctttgtgtggtccagtgtgatccatccacaaacgtccggattgatctttcggagctcttcaaaagaagcgcctccgtctttctgttccgggtcgggcttcagttttaagagctgtgactgaatgtcgtccacagcgccatagacctgtgcgttatcccagagtgcatacccggaatacgccgccgccaggatcagaaacaatgctacaatggcagtgaccagagagttggctgctttcagaaaaaacttagatgcgttcatactgcctcctctctgctgcctagatgatcattagtcttcgtatttacgtcttctggtgatgaatgctgcacctgcgattacgatcacgcctgcgaatacgaggatgtatgggagggttgtgaggttgatgccggtgtcgatgttgtcactgtttttatcgttagtgaatgctgctgtctgctcagctttgcttacttcaccactatttcctgacattgttgtagtgtaaccattggtcctgtagtcatcctcagcaactgtatatgtcacaccatatgggatgttccccaaagatgcagtctctccatctgccaagacaaacccatatgtgcaacttccttttgtccaatctaaactaggatttgtctgactggttcctgcaactgttgctgtaatatcacttctgacttctttattttcaggttttgttaatgtaactgtaaaatggaattttttatttttatcacctgaattaccagtaacttttttagtaacatttaatgttcctgcggaatatttattatcattaaagcttgatgattttacatcttttccgtctttttctgcatgaacacctacctgacgtataagcttgccatcttttccgttaataacagtaacaactaatttgattttatctgtacgataggtaactcctgctgtttttccgtcaacttctttcagttcataactatatttacctacattgttatatgttggtaaagtgacaacgaactctcctgatttgcctgcaccacctttagaaaaagtaacttttgcaacataattactttcatcacctgataatttttcaaggtctggcgcttctgcagcttcaccatcttcaacttttttactttcctgtgttaagtaaaatgtttcagccggagattctgttccgttattctcgagtgtgtactgcttagtaatttttacagttcctacatcgcttggtaatttttcttctgtctctgccgcaaacgccgtacttcccatggtaaacatggtggctgctgcgatcaaacatgctaacagtttctttgtctttttcataagaaaatcctcctagaaatataaatttactaagacttcccataccttaaataggcttcgcaccttgaaaattcaatatttcagctaacaaaatagcgatttatgctactatagccacaggatggagcacgctcctcagatattcgggcagacgagcttcaaaatcagcagtaaatgctgccagctgattctcgctgagctttaatatctcctgaagacttgccatgaaagcatccatcagaatgcaaagagatcttgaaaagctaatatccgccatttcatccaccaggaagaagaacagttctccaagcgttctctggtcttcgttttgacgttgctccagagcaagtaacatatatctggtaaaaacaattgcggtatgagcagtcagtgcatcataggaaaggctgtggcattccccgatcagattcagcatggatttgcaggttttgaagaatacttcaatctgccagcgcttgccataaatacggatgatctcttcttcagaaagatccggatctgtgcagaggaacgcaagccagtctttgcgattcgccttgtttcgcacacatacgatttttgccgggaaagggttctctttcccgagcatgatatcaacggaaagcaggtatttcgatctgccgcggcgcttcttgtttctggaatagatttccttgatgttaagctgttcacccttgtatccgtacttgatccggctgcttttcttgatcatggcaatgacatccatgtttctggatttaatggctgtgatctgtgccggattggcaaaccagcagtcgaacaggacatagtccgctgataatccggaagatgtagcagtatcaagaagcgtgagcattacttcaggtgctttggtctgagccagctttctgcgctttccggcaatggtccgcttatcaaatgtatgaacaggcccgatgacattggactcttttgaagatgcgaccagacagctgttaaccgggatcagggtattcccgtcactccaactgagtgtaagcatacggtatccctttttataggtcatatctgtatgatcaaaaacacgggatcccaattctgtctttttacagctggatcggttgaaaaggctgtcatctacaataaagacattggtgcgcttttgatctgtaagattcttcagatcattgttgacaatatctgccgcaagaagagaagtgaaacgaagccagtttgtctttgtggaattcaggaaacggtaaaaggtatttttagagaatccttccttgaaggatccactgcgttgctgcatatacatacttcgccctacgaaaatatttccaagcttatacctcaaaagagaaatggcagggacacctttttctttcgtgccattgcatttagccagtagttttccaatatggtgttttgaaaaaaatctctggatacagtcaagtagagctatctcgttagtgttgttctgtgctataatggacatggcataaatctcctttgcgaaaatggtttttggcaatttcattatagcaaatggaacgtatttatgcctttttattggctgaaatattgaattttcaaggttcaacacactttattggtgtgggaagtcttagatataaatttatttataagctcataaaaagcagcttatacatttgttgttatgttctctcagaaatgagagaaccgttacttttttacagttctcttcttcggagtatggtgatcacttttgctttcacatcctctgtagaaatggggccgaattcacgactgtcttttgcatgagtccggtagtctcccagaataaacacactgccttccggaactgtatagggatatgtgatcccttcctttgcatatgtaggaaatgcaatttctcctgtctgggctgttccgtttacgagaagcgttcctgtgtcatccattgtgatcacatcagtttcgcatcccaggatacgccctacgtgagttttgccgtcggcttcatacacgacaacatcttctttttcaagattctgttccagccgataaccgatgagaagatctccggcttccactgccgggaacatttcattatccggtgcctggcctataagaaaaacctgtgtaaacagcagccagccaacggccacgatcaacacgatccgccagaaaagacggatgtagccttcctttatttctgtagaatatcttcttttccggattgtctgagaacaggtttgatctttttcagcacgcatcacctccgcacctcttctctggaactatatcctgtgaacagttcagacatttgtatcctgtccggtagtccctctttcagcaagttccttatatttgcgaatcatggcatcacagcttttctgatggtcagcgatcagtgcatcataccgtgcacgttctgcgcttaaggatgtttcataaatctgattcagctcttccagctttttccagagatgaacttcatccactccgccaaacagcaccttccgaaacctgactgtcaggaaccactctttcagtttttcgtgctcatgatttaacgcctctgtttgtggaaactgctctgcttttggctcacgatttccttttttccctgactgtttcttcttcatcacaaccgccttcagctccaacgcttcctgcgcccgaacaacagtacacccgctccggtagccataatacctaacatcagaatgtatggtgttgagttaagatccacgcctgtgtccggaatggcttctttgttgttggtgaattcaacttgatgcgccacattattatccattctcgaaatagaggttattttcgccttgctactctcaacagaagaattaccgtctatcttataggaagtcttatatctgctactattataatcatcctctataattatcaccgttgctccaaccggaacatctgtcaatgttattgtctctttatcagacagtgaagtttctgctgaacctgaatacggtttatcactgattttaaatgaaagatccgtatttccattttttacagaaactgtaaaatggaattttttactcttatctcccatacttccggttacaagctttttaatattcactgatgtataaagcagtgtgtaatgggcgtagaagtttacggtaccgtctgccaacgctgcgtcatttggtgaatatggccaccctgcatctaggatttttgagctactatcatttccttctggatccctttccggataccatccatccagaatgtaggttaatccattgacatcttttgtactgcctatcgcaacttttgttgttttatcaacataatcacctgttttatagtttttcgcataaacctgtgtgtaatccgtcgcacctggctcttttacccagaattttgcagtaaatgcttttttactttttatacttaatgcacagtctatatggtacggatatgttccaccgttatcacgtgaaattttacggggagttaatttaatttcaagaatatctgatttgtcaagactatcaatatcaattcccgtatctttactgattgtgtttttgtaattctcccagattgaattcaatataaatgtaaaatatgaatcagtagtcgtatttccactctttactgtccaagttgtgcctgtacttccatccggccatgagacaatatacttcgacacatttgatttaatattcttatttttgtaaactgtatcttctacataaccatcttcccaggttgccccatctgtattaatacttcctaaagtgttactggtttccgttgatggagcccatgctcctgtatcatttgtccatggatctcctaccgggtcagaaagataataaatcgcagcttttccagaatatgctgctggtgttgtaggtataggcgtcgctgttggccatagccatttagccgcctgcgcttccatctccacatcctgcacctcatccgatgatgaatccacatcttccgccggtgtcacactcggctcttccgtaactgtcggctcttccggcagctcagttacagtggggtcggcgggttgttcggtgtcttcgccgggttctgcagatggctctgttggttcttctgtgtcttcagatggagcttcgataacatctgccggttcctctgtattttcatctccggttgtcaccgcaggttcttccgattgcgattcatccaccgactgctcattttccgcttctgtggctgtcagctcttctgcttcctcctctgatccgggctgtactgtttcagcattttcattggctgtttcactgctggcctctaccgcaaacgctgagatggaaacactgcagatcatcgcaaacgcaatacagactgcgaggatcttcctccacagacggtgttttccagatgaatgattatgtatcatacttcaaacctccttcttgtatgctatggcagtcaaaaacaggcactgctcattacatgtccatgccggtatttctgctctttcgcagagcacaatactctgtgaaagattccctgcgatccgtgtaaattcaacggttctttcttctctgacggcggtttttgacggtttattaaaaaacttaggctcccggaaattctttttccacggtatctgcgatcttcagtttttccatatttttacgtttcaggttcatggatgaatgtacataacattccagtgtgatccgtgtgctggagtgccccaggatctccgaaagactgcggatctcaaatccggcctccacacaccgtgtcgcaaaactatgccgcaaagtatggaaatgaacatttttcagattacaatctttcgtatattgcctcatgcgatactgcagggttctgggctctaggaaataccctgcttttccggtcagaacatatgcttccagatcatctgctctccatttgttacagagcttttcaatatcctggttcatggggattatccttaccgaccttccacttttaggaaccccggttatgatccgggtcctttcttcacttgcaggattgagatttttcaggcgctgcatggtatgacgtacaaagatgactttattttccagagaaatatcttcccatttcagagcacatacttctccgatgcgcaatcctgtcaacaatgccagcaaaaccccaaatttacacggatccatgtcctgtaaaagatattccgtaaaccttttctgttcttcacaggtcagcacacgcatttcttttcgatcctgcctggggtatacgatatccaccggttttgccagtggattctgctttgttgtataattcagaatggaatgcagcacggaaaggatatcccgcactgtttttggtgacaatcctctttcatggacaagcctgtagctgaattgttctacaagtatttctgaaacagcctctgaaaaatactgcccgagatcaggcctgatatatttttccaggatcgttgtatattttacaaaagtggatggtttcacgctgcttcgtttcagatacagccattcattacagtaatctgcaaagcgattccgttttcctctcacgggcagaagctgatcattcatcagcgcataacgtgcctgattgaccttatctctggcttcatgatatgtttttccgtaacagtagccatagtgtatccttccgtttatccgatgctctttgatatatctggcttcccatcgtccgtcttttcttttgtaaatgttttctccttttctgctcattgatctttcctcctgttatgctgaatcttatagtctgttcacaaataagagtttttatccgccggtcttttatcctctgacgatgacactgacggcgaatagtgtcctttttcggacaccacaatatttgcgccctatattatccgtaaaatatggcgaaaaaccacgataaaaaagccggttttcaggaacttgcaccttgaatttccgaaaaatttatggtatttttatagaaacagagtattgtgctctgtgaaatttaccaactataatctaaataaataagccgttttttaagcaaaaaaactccctcacatatcagttttttctgatatatgagggagtttctgatcttatattttatttctgttcttcaagctttctttttaacatctgaatttctttttcctgagctgcaattttctccttttgattatcaatctgctcctgcatctgatcaaccatatacttcactgtgtttctgtcaagaatctttaattcctctgaatacatttccatcatcccttccacattccggcatatattatatatgtgctcgtacatgaccgtaaactccggatatttttttattaatttcacgattacttccggagaatccatactccagacagacagtacggagtattaacgcatatagacgattttaaaggctttttaaccagttaagagcaacatagccacataatctaaattttaaaaatgcaataaaaatgcaatgagtgacacgactacttgctatacttccatcggcttcttcttgataccaacactatgaaaagtccgattacaattaaatatactttgaaaggaagatcaccatgaattacaaattagaactcaaacaaatcgtggaatttccacgctgtcgcatttaccgtgacttcatacaaactttaatcactaccaagagcatccgaactaccgggggctcttttcttttttattatctggtattatgctcctatgcaaattaccgcacatcctaccgccggatggaacacattacctataccattggtccaggagagtggatctgcacagtcacagatcttcaggaatggtttcgctgccgtttccaacatcaagcgttgtccatccttcgattttttgaagagcagaattacattacctactctcttctcggcaaaaaccgcctggtcaaattcaaaatatcagactggcccaaagacaataccgtattggaatacaactatccctgtaaaaaagatacagggtttttctttttcccgattgccaaagttcacgaactaattggcattggaaaatgctcggaaatggatgttattctggatctgtggattcatgcagtttacaacgattcctctgtcctgggatctgattccggtcccattgtctattaccgggataataccggaaatccccttaccagctttaatgaactgggtgaaaggtggagtctgtcaaaggcatcggtatcacgactcttgaagaaactggaggaaaaagaatacattacacttatctcatttacaggaaaacacggaagcgtaatttatctcaacaattacctgtccgtgatgtttaatatcagcgacgttatgattgacaaggaggagatcgctatgaagatgcaattaccaatccatgtaactgaagaaatcactattgaggattctgcttctgttagcgtttcagaaactgtcacagactcacaaatcaccgttacaaaaaatgattcctgcgttccagattcacacatgaaatttatcgtgcaaaaagtcgcagaactattggattcacaagggattccatgttgccactgctccaaaacccgctatatattatctccattatcagcctgcaaagatatatttaatacatttactctaaatattatctgtccctacggaaatgccgcttatcggtttgagttgtccgtaagtccaggggatgagtctgcccaaaagatgcctgccgtggcagagccttctgcactgaaagggggggaatagacatggcaaaccgcaatacacagggatttccttcacccgaagaagatccacgttttcacgacacctatcagtttttacgcagataccgggatgcaacctacagcctgaaggtagtcgtacaccagatggagcaccagtttaagctccaatacgacaatgacatcgacaaatttctggactccatctatgctgccggggctgatcttaccggaagcgacatcgaacaacgggcaaaaagtattgccagaagcaaccagatgctgaagcttttggaatcatccatcgatctcctccggaacaatcacaagcatggggaacagtattactggattctctactacgcttttctctctccacaggaaatgaaaaatacagatgagatattggataagctggctcaccacatcaccaatatttcctaccgcacctattaccggaaacgcagggctgcgattgaagcactcagtaccatcctttggggatttactgcaaaagagacattggatacgctcaacaagttctttccagagtaatacatatcgcctatctcctcggcttttcgtaatatcataaaaatgttatactaaaaaatgcaaaatatatattgactctcacggaacgtcatagcgtacagttatcttatcaggaacaggaggtcagcaactatgaggacagtcaaagaaatatcagaacttacaggtatcagcgttcgcacgcttcactattacgatgaaatcgggcttttaaaaccaacacaaaaaagtgatgcgggataccggctttatgacgatagggcattggaaatattacagcagattctgtttttccgtgagtttgacattcctttgaaagaaatcaaagctgttctggagaatcctgctcttgaaaggaaccagatcttgcaaatgcagagaaaaatgttggtagcaaagaaagaacgtatggaacatctgattgccagcattgatgatatcctgaaaggagagaataaaatggattttgcgatttttagtaaaacggaagttgaagaaatgttccaaactatgtttgaacatatgcctgacaatatgaaagaacttgctgtaaaagagtttggaagcattgaagaatggaaaaagcattatattaagaccgtttcatcagaagaaatgcagaaaggctatgctaaagttgttgagtggtatggaggaaaagagcaattcctgtctgttgccaacaatcctattagcaaagaggctgcagaaagttacaaccaacaatttgacaatcttttatacaaattagcagctaaaaaagtatgttcaccagattcttctgaagtaagagaacttgtttccgaatacggttttcttatgaaacaactttcacagataaagaaagaacacggtctgatggttgcacaggctcaatattaccgtaatgaaaaaatcaaacctatgatagatgaaaaatacggcaatggtacagccgaattcttcgcacaagctttcgaagcattttataaagacaagtaatcattagaactacacaaaagcacaacaatacaccatgcagggaatcaaaatggtttcctgctttttttatgccaaccagtgaaaatggcacagaaatgacctgcttctgcgattgaagcgtaaaattacccatgctacaataggtattgcttatagttttccttatttccagcacccatagatggtgctttttttgtacctgtaaattcaatcgctgacagcaggttctatgtactttgtacgtacactatacttacaataccaaacgtattctgtacgtacagccatacatataaagtttcctattatataggtaattgcgaaactcgctaagttccttagcgatctcgaagcaaatcaggaaagaatgcttgcttttcacggattgtggaatgaaaagagaattcttacacattttaggcgcactttaataagccataggctttatggagttggtaagtcctatgcaatgagaggttttaagctgcgaatgtattcatgatgcttaatcttatgtgcaagaacaacagtaataagctgcgtgattccggaaaggatcagatcagcatgtaaagtcttctcgttttgagttcggcgtcctgcaagacaaagattatccttgatgtgattgatgtctctttcaacaactgttcggattttgtaggtgttgtcccattcttcggttccccggattgttccgggataagcgcgaagatccttttccggatagatgtagaccattcgtccacatttagatgaagtacaaggagtttcacaaaaacattggcgatgtgatttctgggttgctttatcgtaaacccatttcattttaggacaaacgaacttaaaagtaggtattccgctgcgtaagtttgatttactgccctctggcttcattaggagcaatggatcatggggacagcaggggattccgtctttattaatggtataatcctgattttcaagtccggatcttgcattcagagggatataggctttggagaaatgtttgttatcaccaaaagtgttaccagtaagaagattcttatagagttctgcggtatcaaaagctgcatcgccaaggaatgttttcggattgatcagaggatgtctggaaaagaagtccttgagtgttggaatcaagagttttgaatcgtggacacatttatcttcgtcaggggaatcggatttcttttccacaacgatgtcaggatgagaggtcataaaatctttgttataaaaagagatatgacgaatgatgccgagaccattggtaacaatgccgaacttgaagacatagcaaaaatgtccattgatatacagctgcttgatttcaggattggcagaagcatgggaaggcatggaagcgtaggcagccttataaggatcgtaggatttatcaaagcgctgtgctttcgcatatgccttaagctgccgaatgatccgattgacatatttaggattattttcggtaacaaatgcttcaattccggaagaatcgaagatggtcatatctgcttttgcggaatcaatggcctgacagatgggctcggtaatatcaacaagttgatcgaatacgagctgcagatcatctaaaaagtcctgtttgaaacgcgtgattttggaagcatccgggactttggtaaaaccgcagaattcacgaagaggttttgagtaagcgagaaaagtcaggagaagctggtctgtaggaattgagaaaatacgttggatgatcaaagcccacaggaaagcttgcaaggggtatttacgggttctgcccgttgatgcataaaaatgatttctaaaagaaatcggaataatttcatcgatgtcgatatgagtttctaatagggaaagaaatgcaggtttgtcgttttcaaatttttcttggcaatctgaaaaaatatctgccagagaaagctgtttatatggtatcataggtatcagaataactcctttcttggatggcggtttatagtttttggacgactctattataccatatccagtgaggagttatttggttttcaggaacaaaaagtgccgtatttatgcggtttatggcgtttcgcaaacgcctatttcctattatatatagaagggagtcaatcatgaaaacaaggaacgaaatctatcaaggagagggagccaagctcttacggttcattaccacttaccatactctgaggtatgaccaggttttacaacttttctcccgacatgagcagtctatcaagtcattgattaccagcctcatcaaacaagggcgcatcatttacgataaagagcatgaccttctttgtgacagccagcagtctgctgagaatcctgactatgctataattacatgcttctgggtactgctggattttaagaaaggtgttgtataccacaccagtggcgaatttccaatcaagctcaatttcttttcgcaagatgaacaatacgaaatcatctatatcggtgaagaacaggaggctctgatcaatcatgtgatggaaagtatcccatcaaatggttccaaacgcctgattgtcttagaatccgaaagccaggctgccaaaatcaccattgatgatgtagccgcttactgccttgtaaatgaatccggtgctgtcagttactacatgagaaagtaggttattatgacgcaaaatacaccaaccatttaccagcggcttgaaaaactggaaggggagctgcaaaaactgacgaataccgtttacgctctgaaggtcactgatatccagaattatgataaaaattttgaggaactgagcgtcagtgctgctcttcgggcggagcggattgcctgccagatgcgtaaccttgtctgtccggctctctccccaaatcaagcagcttatcttcccaaagcggcagatgcacagggaatgcggattgcagaacagcaggggattctcaccattacgcttcccggactgcttccgaaacgaagagtccacacaaacactgcatttctccatgaaccgcttaattatatgcttcgggagtatgtaaaacaaaatgccctgcccctctatcgtgactgcgtgatatgtttcagtcaaatatatgacagggaacttcctcaaagacgtatccgggattatgacaatctggagtttaaacagattctggatacactttgtacttatgttctgacagatgacagcggctttttctgtgattcctactacacgacacagcttggcttaaaggactgtacactggtatcggttatggaaaaagctgactttccgaaatggctgcagaaccagaaaaatcatcacgaaagcatgtcggaaaatctcctgacttctcaggcagaaatccgacatcggtaagaaccaccgcagggaactttgttttcttgctttttttatctccaaaccaccggagatttacccaagtataggcttgcatgggtaagaactgaattgaggtgatgcttatttgataagacctgacactacgaaataccgcttactggaaatgatagggatgtgcggggaatttcccgcagaccagctaaacagactcatcccaagtgcctcctatgcggaaaaactcattacggatttgaaggcggaacacctcatccgtacccactaccgggatgctctcagaggctaccgtcttacaaaagctgcgaaagaaatgctgttatctgtctcgccgttacgcttccagtgctatctgaccggcaataccgagacgaacctcatccgaagtgaagtatcccgacgtatccgcttacatcagaaagccgaaacgtatctgacactccttcatgccgggattcccttttatccggatgtaaaacctgacatcttctgtaatcaccgcgaagctggttccatcggtatgcgaagccttcctcttttttacgcttccagagaaattaaggaattgggcccggagaccacgaagattaggaactcccgcagcatgggcatcctgatggcaccgcaatgtgtctatgtcctttacaacacgggaaacggagtcctgaaatgggaatatcgaacggaagtccgcttaaacgccttcctgcagcattacctgcaaggctacccttacaacggacatccacagatccgggcaatcatgaccggaaccgacatggaaatggctttccggctgtttaccagtaccggaggctacaaaaagagcctgtttatgctggacacctccttcgagcatttccattaccttcccaatactccggaaggggaagtgcttttaaaactgctggttcaccctgagatcatggaaaagctggacaacctcctgctgtccgatctgggctgccgcagcgattcaattccactggaacatgatgccacggatgcttccgggaaccccatccttcttgcttatgattttgacatgcagcgaatcaaccggttcaataccggcttaaatgtatacggcagatccgggaacctgatctgtttcgattttcagattccggtcctgaaaaaatacttatctgccacaatccatttctccagtattgacctttgcaaattcaaaagggggtttttacatgaaccgtaaatggtggaagctcatttatatgcttccgattaccttctgcaccctctatgcaggaggctatgttgctcaatttatccgcaactatcagacctgggaatctgccggcaattttgccggaaacggaactgccccgcagatcccctccccgaacccgctcgcctgtctggatgccctgactgctttcccgtacaatctgtatgggatttttctatgtctggcagcttttggactcctgaccttccttctcatgcgtatgggatttgaccgaaacggggaaataacagaccgggaccggaacctgaattattccacaaagggaacctatgggacttccggttttatgactttggaggaaatgcatcaggtactggagcttacgaatgatgtcaagaaacacaagggaaccattcttggaaaactgaacggaaaagccgtttgtctcccgaaggatacccgcatgaaccggaatattgccgtttacggtgccagcggttccatgaaaagccgggcctttgcacgcaacatgatcttccagtgtgttgcccgcggggaaagcctcatcatcaccgatccaaaatcggaattgtacgaaagtacagccacttaccttgagaatgccggatatatcgtgaaatcctttaatcttgtaaacccggaaaactcggatagctggaattgtctgggtgaaattagcggacaggaaaccatggcacaggtatttgctgatgtcatcatccagaataccggttctgccaaaggcgatcacttctgggacaatgccgagatgaacttattaaaagctctgattctctatgtggatcagggattcccaccggaggcaaagaatatcggacaggtatacaaactcctgaccatgagttcggaaaaagaactgaacagcctctttgacctgcttccggtctcccatccggcaaaagtcccctactgcatctataaacaggcaagtgacacggtacgttccggcgtcatcatcggactcggttccagacttcaggtgttccagaataagctaatccgccagatcacttcctatgatgagatcaacctgacgctgccgggaaaagaaaaatgtgcatacttctgcatcacttcggatcaggacagcacttttgattttctttcttccctgtttatgaccttcgtatttatcaaactggtccgttatgcagacacctatggggaagatggaaaactgccgattccggtacatatcctggctgatgagctggcgaatacgggagcaatcctatcgctcaacaaaaagatttccgtaatccgaagtcgaaacctcagtatttcctgcattttccagaacctgcctcagatgcagaaccggtatcccttaaaccaatggcaggaaatcatcgggaactgcgacactcagctatttttaggctgtacggatgaggtaactgctacatttatctctaaccgctccggtgatgtgaccgttggtgtcagcagcgaagccaaacaattaaatagctggagagtatccgattatacaccggaataccgccagaccagatccatcgggaaacgaaagctcttaactccggatgagatcctgcgcctgcctctggataccgcactgattatcctgcgtggccagaaagtactgcaggtagaaaaatacgattacaccctgcacccggatgcccaaaaactcattccccggaaggcttccgagcatattccggaatggagaaaaggagcatgtagtgaagaatatacgtacactccgactattcctgcttcccgcccgaagagaactgcttcttatggaaagcagaaaaagaaaaaaactgaaccgatttttgaccagcaaagcgtttatcaggaacctgactatcacgatttcccggatgacttctcagcagatgactatccgtatcacacagacatggttcctttagataaagattctatcatgtcataatttgaaaggagacactatgatgccaaacgaaacaaccaacacacctattttaactctggattccgatacaaagctggaaacagcccagtccatttcagaccttacctggcatgagatccagaatgcctaccgtacccgccggatcttaaccggaatgcttggcggtatcgagaaaacagaaaacggcagcctcattgccgtggtttactacaaggatttccgtactgtcatcccggtaactgagatgatgatccatctcatgcaggatgaagcacacgattatggggagcttgccctgcggcagaacaaaatcctcaacaatatgcttggatgtgagattgattttctgatcaagggattagatccgaagacacgcagcattgtcgccagccggaaagaagcgatgctgaagaaacgccagatcttctatctggataaagatgcttccggaatgccgaaagtttatgaagaccgtatcgtgcaggcaagagtcattgccgttgcggaaaaggtagtccgggcagaaattttcggtgtggaaacctccattcttgccagagacctgtccttcgactggatgggtgatgccagagaacgcttccaggtaggcgatcacatcctggtacgcatcctggatgtgcgggcagactcaccggagcaggtcattgtccacgcagatgtcaaaagtgtggaaggcaacaccagcaaggaaaacatgaaaaaatgtaagattcagggaaaatacgccggaactgtggaagacatccataaaggcaccgtctttgtccggctctccatcggtgtcaatgccattgcccactcctgctatgacaaccggacagtcgggaaaaaggatcaggtatcctttgtggtgacgcatattgatgaagagcgtaatgttgccctcggcatcatcacccgcatcatcaagcagaccatataaggcttccaccttatttttaaatagctttttttcatatacagcaccaattagtccagcaaatacacacgatacagctacataaggtgacagaataaagtatttttcagaccattaccttattgtactgaaaacggtaacgtgttatactgattcggtattactgaactggaaagacggatgcatttcgatcttgccctctagtaacaaaggagggtgatgcccatgaatacaatggaagtattgactttactattggtaatttttgcggctttgacttatatagatcgacataataagaaatagcatccacgaccctaggaaagttttggatgctatgtcttatacatagaatataaaatttaactgagggcatcagattttgcatctgaatacctttcttgagttcattatacactgggggctttgagaaatcaagtccccctttttattacgacattgattagtacctgcattaaacatcagaaatttatattcttactcactgaaacgaattctctctatcaatgaatctttccttactgactttgcaatgaatattgccaataacatctgtatcacaaacaatgttaaaattataataatagctgctgttaccggataatggtatgtgctgatatcaaacattcctgtacgctttgcatataaaaacaacggatatcctgcaagacttcccactccgatactgataataagagtgcctactgtatagaatataccttccaactggagcatcttcatcaactgacggtccgacattccgattgcctgcatcatgccaagctccttttttcgcacatggacactattgatcattgtgttaatcaagttcataatgctgattgctgccagaatgatgataaatgcataacatgcacctctagtcatctgtatggcattttcccatgtatcgtactcattcttccaggtacgcatctgcagtctgcctgatccatccacaatagcctgtagagatgcttccagtgcctcatcataatccttatctgcaatcacctgaaaatagctggaagaattatttatggtaagtttctctgccccttcttttgccatgataagacagttatagtttgtcagacctcttccatattcaccaattgctgccacttcaatctctttttgaaaggtattatctccatcatgaatattgagtttcagcttatctcccactttaatatctggataccagtgaagtagcgcgcggtccagaatcactttatccccggatttcaattcctcgtatgtgacattgccttcagtgattccttttttcagctcttctgcgtattcttccggcactccattgataaattcggttccaattttttcttcaaaaggtcctcctgataccttcaacgcggtaaacacatctacccgctcaacaccgtcaagctcctctatctgctgctttagtccttcatttaatggattattcttttgaacctccgcccattcatattcaggatgctctttattcccggattccacaattggagaaatctcatattgccccacaatcgaactctttgcactttccatcggatttgcacaagacagcaccgttgctaccatcatgacaaatattccggtaacggccatagatacaatcgtgatagtactcttctttttattctctgcaagatttctcttggtcagtcgtccgatattcagaaattgatatcccttcctgctgcttttctgtcgcttactgcctccctggtaacgcatagcttctatttctgataccttcgccgccatacgcataggcttcatcagtgacagatacactgtacacagagtcactgcaattgccaacagataaatccaccaataataaagttggacttctcctttagctacaaccttgtatgcctctgttataagtacgtttgaatcctttgcatgttctacaaactggagaagtacaactttcacagcaactgttccgatcaaaagtcctatcggaatggcaaacaacgccactcccattccctctcttagtacgatttgtctaagctgccgtttcgtagccccgattgcctttaactttccaaattcccgaaccctctggttcatagatacataataaacactataaattgtgataatgcccgccaatacaacaataagcatgattcctacaatcaccggaattgtagccggatccacataatttgctgcaagatactctttattaatattcatgtcatcctcggaaatcccgaactgtctggcaatattctgtatcgtctctgtataatctgcagtcgtatttcctttctgtccattcacctgaagtaaaaaccgatatttcacctgttctaccggtatctccgctttcagaaaggcctctgaaaccaatgatgtatattgtttttgttctttgctgctctcattatctgctaaaaaaccacagattcgaaagtctttctccttcgtataatccagtccgtcatctttcagaatctgataaggtactgtgatagtgtcaccgattttcccattctgtcctaatgcttccagtattccttttgaaaccacaatatcattttctttctgcggaagttgcccctctttcagcttcactttataaagttccatccctgttctgtccatatacatcatggaaaccgtcgcatcttccagattcatgtaccccgcatcgctgcggagtccgtaagttttcacatcatgatgtgccgccagtttcataactgtactctcgtccacgttccgataaagggcatgccatgttggataaatcttattgattaccgcaaagttcacttccaccatatcttttccgattgatgggattacgaacagcagtaatgttgtcaggataatggcaattccaatcagtatgtttttgctcttataatgccgcatattgcaatatgcaactctggtcgtcatcttcattatcttctcaccgccttgccatcttcaatgataatcatttcatccgccatctgggcaatcgtttcatcatgggtaatcatgataagcgtctgcccgaaatccgacacgcagcttttcaataggctcataacctctagctcagtctgggaatcaaggtttcccgtcggctcatccgccaaaattatcgccggtcttgtcaccaatgccctggctatcgcagttctctgtttctgtccaccagacaaagcagacggcatcgcatctttcttatcctgcagtccgatttttttgagaatatcttccacttcccgcggctttaccttgcgattatcaagtcccagcggaagaacgatattctcccacacattcagcgatggaatcagattaaaatcctgaaagataaatcctatcttctttcttcgaaactgtgccagtttatcatcttttcgagaatagatatcggttccatcaatccatactttgccggaatccggtctgtcaagccctccaatcagatgcagaagtgtagattttccggagccggaacgtcctacgatagctgtaaacttgcctctctctatctgtaaacttgtatgatccacggctctcacctgattctcgccttctccataatactttactagatcttctacttttaaaatactactcatatcttcaagtcccctttccatttcatacccctactataacattcctgcattacaaaacccttacaacaaccataacagttttgtaagggttccgactattctcctattatgagcggcagtgtcactttaaatatcatacctttctcagcctttcttttggctgctattgtccccccctgttcttctatgatctttctggcaagatacagaccgacacccgctccgtcttttacctgttcctttgctttccttccccggtaaaatctctgatagatcttatgcagttcctccgcaggaatgcccattccttcatcttctacttcaataagcacattgcttgctagctcctgcgtcctcactgtaatcgttgtatgttccggtgaatatttgactgcattctcaaggatattcgttaatgcttctaccgtccattttgaatcatggttcacaactatatcatcatccatctccacctgaatggaaatatcttttcctcttgccttcatataaatctgactgacagcctctgttagcgttttcttcaggctttcatgaagcgaatgtatctggatcatatgtgtttccagccttgaaagatttaccagttcattcaagagctgttccagtttggtaagttcctgtgattcctgctccagaaactccctctgttcttctcctgtaacccgattttctgccaccagctcatgactcatccggagtgatgcaagcggagtcttcaactgatgggaaatatctgtaatcagactcttcgtaccattttcttcctgctccagacgttccttcaaatcttcgaaatattgccccagctcctttacagattcccacacctttaaccattgttccgattctgatgtttcttcaggatatgtttggaattttccttttctgaattcctgcagacattcatataattgctgtaattgttcctcatcaccgtatctgctccagttttttcttcggtccaggtacaagaacaggctacatactatgactcccactagtaatccaattccccagataatccttataaccacatctgaagatccactccctgagtgataaccataagtttcttccagcatctgtacgactctttctatcttctgatcgtcccggtctcttataaaatctactgttcctgacttttcccagattgcaactatttccccttccagttcaggatgttctgcaaggagcagtgctatctgcgttgctttcgcattttcctcatactttgttatcagatacattcctactgtaaaaaatactgcaaagattacatatacgataaaataccgttttaatttttgtttacctttccggtccatatatatcccagtcctctcacattcgctatctcttctgttccaagtttattcttcagtctgcttatattgacagtaaccgtattatcatcgacaaattgaccgtctatatcccatacatgctccaggatactttcttttgaaacaatctgtcctgcattctcccagagatacagcaacagagagaattctttcttacttaaagtaactggttcatcccctttatacacctgcatcgttttcatatgcaccgtaatctctccggaagacataatctgtgcctgtaccttagaaagccgtctcatcaatgcgttcaccttcgacaccaaagccatcagtgaaaatggtttggtaatataatcatctgcccctgtatcataaccatttacaatatctatttcctgatccaaagccgtaagatagataagatatgtatctccacctgcacgtaccatccttccaaaatccagtcctgtaccatccggcaatgtaatatcgctgataacaagagcataatctcctttttgaaatgcttcttttgcttcctttattgtataaacctgacgaacctcatacccttcccgtgaaagtaacagggcaattccccgatttagattcaagtcatcctccagtaataatattttctgcatcaaatactccacctctatttgtaataacctgttcttttatcatatcagtcctatcttttgtctacaataaaaataaaattaacatacatacttttccttcatatgttcaaggatttcaccggatactgcttcagaaatcgatcaatccatttctgattgcttctctgtaacatccgaagtctggataaaagctgtagacaactgcagctctatgttactaaagtcctatccatcaatacaggagttatagaatgccgtgaagataccgtcaaattccatttcaataatatgtaggctgtccattgtgtgctccagataagtcagtgttcctctatccaaatctatactcggctttcctagtgagtttgctattacatctggatttgtaattccaaacatctcctttatatccggcataagataatccacgatatccggcagccttttctcatacgcctgtgccagttcaactgcatgcttctcataatcggaatgtatactgtcacagacaaattcaatcccgtttatttccatcttatagtaatcattattctcatcatagacaaacgctgtacccttactttttttatttttttccaaaatccccatgatatatctacactttcccggttcttccgccatacacagtctaaaaaactgtaacttaatgcttacgtttgtaaaaaataactcctgccaaaatcaataaaataattccaactacaatcataaaaataaaattatcaccatttaacttccctgctatgaaaatagaagtcgggccatccgcaccaccaataacagaaacggctgtgttttctttctgcttcagtacaatgccaatgactgccaatacaattcctaaaattccggctatgattcccaatcgctttttcattgctaccacctcaaatcatttttatctgctcaatcaaatgtaaattgttatgcaagtatttctatgcaaatgaagcatagataacccatatttctgcaaacattaccaataaaagtacaccatctatcatccaattaaactgaatgtccgttaagaaagtttttgaatgtgtcaggcaatattttactttttctcgtccagtcaaaaaagtgataagcacttgtaatataggaaataaaaatatttgtatttttcttccataatcatccgcaatcccatttgcaaaatgtactggaataatactcggtaagaaaaatatacttacaagagcaagcaaaaatcctattatacaaattatccatgtgaattttctagtattgataaatttcataacaatccttctttctgctaaattcaagtttttccaatacataacacgtacttacattatactcctcaccaatgcaaacctcaatttattctccatcctttttcccgttattaagcttcgggcagtaaaatgcctttacttccaccccatcttcctccgactcaatttccacataataatcccggataaagtatcccgcattatgctcctgaatggcgtacagctccaatgtctgaaaatccaccagtaccagatcacggggcttgggtttttgcgtttcctcacagaatacctccatgctttccaccagcttatccaggcattcctgacacagatggttctgtacttttttcacatcgaagatactatcttccccgtaatccaccgatacttcggaaatcccgtaatccgacatctgctccgtatggaaaaagcagccgccttctcctgtcccggtataacccatatgcccgtttccctgcgggccggtaagattcccgtcctcatcatgattccggatatgcatatccatcacataccagtgattggtacagatcactcccagatcgtcaaacttccggaaataatccatcatactccgttcatcgcttccacacagccagcactgttttggatctttcagcttgctttctactgattcaggcacctttctttctaccgggtgatattcctgctcctgtgttttttcaagataacctgtcagatccagccggctgattcccagtccgatcagaattcctgacgcacatgccaataatcccacatatccctttttcatattatagtcatcctttaagaattagttttataatgcttttaggattactatatcaaatcttgcaatcactttcatcataaatcgcatatttttatgtgttttattgcatatacagctttcaaaaaaactgcctgcggcaatttcgcagacagcttctatttcatcatctcttcaattatcacatccagcatccgaagcacgctttcctgcttcttcggtgtgagcctttccagctttccttccactacagaagtatgttccattctggtaagaggaatcacttccttcagcacttcattcggttccgcacctaatacattcaacagctttacaaatgtttccatcgtaggtgttttcacttcccgctcaatcgcacccagatggttggtactgatatccaccagttcagccagtctctcctgcgtaattcctgcctcttccctgtacctgcggattgcctttcccattcctttcacacgcacacctcctccttccagtattcactaacgcttaaagcattagtcatgtaaatccagtataattggttgcaaatcacgcttacagtatccataaggattgcatttataacgcttttagcgttggtcacatttttggcactccatcgtctgtaactggcacagtcctgcgattgtagcggtaatttacccatgttaaaattgatattgtcaaaattatatgcagaacgaaacgcagcactgccgtatgggaagcctctcctgcggcaaataagctgcgttttttctgtaagataggaggatctttacaatttcatactttgatttaggacgcagcctgcattgaccgggctgcgtcctttcttgaggcaggaaaaccataagcaaaggcaggggaggtaattctcctgccgctcttataaaaaggaggtacttttacgtgaaacacaaactgaaaaacgctccgccggacacaaaacggcatgtcaattatggcagatgcctgtatgctgcatttctggctgtcacagtcctctgcggatacacacagccggtttttgccgctaccatctggaccaaagccaatgagatcatgaaggatgtctataaccagattatcctcatttccaccattgctgcagtcgtaacggcatcggttgcccttctgatgatgaatttttccaaaagcggaaaaaccgtggacgaatcacgtgcatggctcaagcgtatcgtcattacctgggcgatcttaaacgggcttggctttatcatggcttacatcaccccgttctttgcaggcggaaaatggaacggatagacgaaaggagatgccactatgggaatacttgacggaatcgtggaatggattgccgaacaggtcatgaacattctggatctgatcaccacttcagtcctcggtgctctgggctgttccatggatacgtttcttcgctactttcctgctgccgagaccatgtatcaggtctttctggcactgggcatcgggctgatcctcttaaactgggtatggcagctctttaaaaattactttatgggagccggtatcgaagcggaagatcccattaagctgtccatccgttccttcctctttatctttctcaccttctatgcgaaagatattgtggatctgctcctgaagatttcaggaacaccgtacaactggattctgacggaagacctgccgcctttaaaatttgcggattttaactccgtagtcacagtcatcctgggagtctgtgcaaatggggcggtagccatcattgcactgattctggtactgattctggcgtggaactacatcaaactgctctttgaagcggcagaacgctatattcttctgggggtactggtctacacagccccggcagctttttccatgggtgccagccagtcaaccggaaatatcttcaaaagctggtgccggatgcttggcggccagttctttttgcttctgatgaatgcgtggtgcctgcggctgtttacttctatggtcggcaccttccttgccaatccgttatccctataagaaaggaggaccaaaatgaaacttagaaagaaactcataccattcctggtactaactgcctgtctggtactgttttgctccatgccggtctttgcagcggagcttacggaagcagacgtggaagcggcagttgccagtcagggaaaggaagcggtaaccggaaatgtcttcgtctggttcctgtgtgccattgcctttttaaaggtatcccagaaaattgattcttttctggcatcgcttggcatcaatgtcggcaataccggaggaaacatgatggctgaacttctgattgcaggacggagcctgaccggttccatgcgttcccatggtggtggcggctaccacaaagcctcttctcccggaagtgcggctgtcgcaggaagcttcctatccggcgggcttgccggggcagtgggaagacaggtacaaagagaagcggtcaattccgcaaccggttataccgaacacagcagtatcggaaacatgctctaccagtcatccctgaacaaaggcggagactttgccaatcaggtcatcagcaacattgcacagggaaattacggtcaggtaggttccatcaagggagcagacgcacagaaagcctttacttcctatatgggcatcaatccgggcggcggttcttcctatgataatgtagaaatcggtggcggaaggatcaccggtaccgaaaccggaagctccggaaaccgggattttgccctgtaccatgccgaccagtatgcagctcctactcagggctcctactctacggtacagtccgtggatggttccacctggtacaagcagtatgcacaggatacggtcgaaaaaacaccatatacttccggcagcggcaaagtagcctacaatgaatccattgtccagaaactgccgccagccccacagcgaaaggagcgtatgtaacatgccaaaaacagccttgatgggcagtcctcttgctgtcatcggtacagtattccggcacaggcgcacccttgcgaaaactggagcagccgtcggcggtgtactgatgcttcccattctgttccttgtcatgcttccgggactcgtcttcggagacctctctgaaaataccggagcactgaccagcaacacggtaatcagtgaaaatatccgggcttccaatcaggcaatcgtggaggtgcttcaggaaagccatgatgcactgcttgctaagatcaatgcggaaattgccagactcccggaaggagatactgcctctatcagcgatccttacgcttccagtatcatcgtaaatgcgaaccagctcatcgcacagttttgtgccagccaggatgactataaaaatataaatatcagcaaactcaaaagcctgatccgggaaaacgaggacgggcttttttcttatgacgttacttcagaaacggccacggtggaagttccggcggaagaggaaaatgcaccacccagaaaggttacttttacccgccatacctacacggtcagctatgccggagatgcctactttgcagatcacgtctttcatctgaccgataagcagaaaaaaacggcagacagttatgtggaaaacctgaccatgttctttggcggctccgcttccggtcttgccatggcggtaggtgtcagcgatgaggtgctggcttaccgggctaccatccagcaggtcgcacagaaatacggcatggaagcttatgtggaactcctcatggcagtcatgatgcaggaaagcggcgggcgtggaagcgatcccatgcaggcggcagaaggcggctttaataagaaatacccccatgtccccaacggcatcaccgatcctgcttattccatcgaatgtgggattcaggaattaaagtatgcactggataaagcaggatgtaccggacctaccgacctggaccgcatcaagctggcgcttcagggttacaattacggctccggctatatcgactgggcaatggaacgtgacggcggttataccaaagaaaacgccattgcttattcggatatgatgtgtgcccgtccgaactggcattatgaccggtatggggacaaggaatatgtggagcatgttctccggtattatcagattaccaataccggcggaagctatccggcaaacggaatgcagattccgcactatctccagaccgattacgggaacattccttatggcggcggctccatcgcatcttccggctgcgggcctaccagctttgccatgatcgccagctacctgaccgggaataccattacccctccggatgcggtggcatggtgcgggaattcctattacaagccgggagttggaacctactggagctactttcaggctgcagccagtcatttcggctgtggcagcgtcacacagaccagcaatgccaatacggtacttcaggcactctccgaaggctgtccggtcatctcctctcagcgggcaggacttttcaccagcggcggacacttcatcgtactccgaggtgttacggcaaacggcaaggtactggtcaatgatcccaatgacagtgacgcaaagaactatattaaccgtgaatttgatatgatgtcggaaatccatgctacggcaaatgcctactggatcttcgacaaaaaataaaggagccattatgaacagaacaaaagtgattctttccatttttctgatgctgtttctgctgcttgccggactggttctccccagtttctggaaaagccagaaaaaagaagcttccggaaacaaaggcagggaaccggcaaaggaaacaacagaaacaaattctgatacccccatgccggaatatctggattttgatgctttaaaagcatttttctccgacagccagattgcttctctcaaagggcagtttcctgtctacctaaaagagtatgtcaaaaaagaacagacaagcatcaccttcctgccggaaaaaaccagctaccctaccgaaacaaccgtctgcctgatgtttttactttccgatcaggatacgcttccggttacctatcacaccccgacgggtgtgtttttatttggagaagacggggtacaggtctctgcagatacgactgtttacgaaaagcaaaccgatgattccctgccgtccctgacttcgcaggacattgaacacctgcaggaaggcgggtatccggatacttctgacagcccggaagctccggacacagaatccggcagtgcctctgtgccttccgaagatgcgaaagatacgaaaaaggaggtgcagccatgacacagccagaagaaacaccggtttcctttatcccttccaacttcattgagaaaggcaagatcctaaacggaacttttgacatccgcaatgccatagaaagcattgttctttccctggcaatcggtatccctgttttccacctgccgctgtccctgactgcccgcatcatcattctctgcatgaccgcacttccagcggcaatggtagccctgattggaatcggcggggagagcatcactgcctttttgatgaatgccctgcgttttgtagtgaaccgcagggtaatctggaggtccgacagtcttccggaaggaaagccacgcaggaaaccacgtttcaaagagccaaagacaaagaaacaccggaaagcagaaaaaatggcagagccttccaaagtaatggcatcggctcccccacagtctgaaccggacgcaccagctccgccaaaaagtaaaaaaaaagaacaccggcagtttgatacctccaccaagcggggcatcaaaaaacaggcaaaggaagatatccgttatctgaagtgggagcagaaagaagccagccgacagaaaaaagaggcggcgaaacagataaaaatacagaaaaaaacggaagcccggagacgaaaggaggaagaaaaacgggcagtttccgaaaagcgggctgcaaaaaaagagcagaaaaaaaaggtggtttccaaggaggacacctcatctgccacgtcaaaacccgtttcccggaaaaagcgaaagaaagaccagaccttggaggattatcttccggtggaaaaaatcgcaaacggaatcgtctataccacagacggacggtacgtgaagatcctggagattgaaccaatcaactttctgcttcgaagtgccagggaacagcagggcattatctacagctttatcagttacttaaagatcagccctgtcaaactccagatcaagatgatctccaaaaaagcagacatcaataagcatctggagcagtcccagctggagctggagcgggaaaccgatccccactgtcaggaactgcagcgtgactacatccagtttgtccagaacttaagttccagagaagcagtatccagacggttctttctgatctttgaatatgaaccattcaacgcaaaccgaaaggaagaggaacgggaaatccttgctgctcttgagacagcctcccagaccgccaaaacctttctataccagtgcgggaatgaagtggtctcccatgacaatgaggatgaatttactacggatgttctctacacccttttaaaccgtaccctttgtacggaggttccgctttcgaaccggatcagcactgtactgtccgcctatacaaaggaaaatcgcatggaggaactggatcacatccggatcaacgagtttctcgcaccggaaagtgtggatttcaagcactcccattatgtgcagatcaatgggctttaccattcctacctgcttgtgccgtctgacggctacaaaaaccgggtaactcccggatggctgtcactccttgtcaatgccggggaagggattgatattgatttctttctccagaaacagccaaaggacaagattcagcagcgtctcggtcagcagatccgtatcaaccgttccaaattaaaggatgcgtccgataccaacactgattatgacgatctggattctgccatccgctccggatattttctgaagcagggacttgccaacaacgaagatttctattacatgaatcttctcatcaccattactgcttccacgttggaagaactgcagtggcggattcaggaaatgaaaaagctcctgatctcgcaggatatgaacttacactcctgctactttttacaggagcagggatttttatcctctctgccgctggcaaatctggacaagaagctttttaagctgtccaagcggaacgtactgacttccggggcggcaagctgctatcccttcgtcagctacagtatctgcgatgataacggaatcctctttggggtaaacaagcataacaattccctggtcattgcggatatctttgattccaggcagtacaagaacagcaacatctgtatcttaggctgttcgggagcaggaaagaccttcaccatgcagaccatggcactaaggatgcgaagaaaaggcatccaggtgttcatcatcgctccgctaaagggacacgaattttaccgggctgcaaggaatgtcggcggagaatttatccagatctctcctgccagtaagaactgtatcaacatcatggaaatccggaaggtagacaattctgtaaatgaactgctggacggaccgacactggatgcctccgcactggcaggcaagatccaaaggcttcacatcttcttcagtctgctgatcccggatatgtcccatgaggagaagcagcttctggatgaagccctaatcaaaacctatgccagaaaagggattacacataaaaatgaatccctgacagatccgcagcatccggagcagtacaaaaagatgcccattctggaggatgtctacaatgtcctgctggaaagcgaggataccaaacgtctggctcatatcctgaaccgcctggttcacggttctgcttcttcctttaaccagcagaccaatgtggacctgaccaataaatatacggtactggatatctccgaactgaccggttccagcgatcttttaacggtcggcatgttcgttgccctggattatgtctgggataaagcgaaggaaaaccgtaccgaagagaaagccatctttgtcgatgaggtctggcagctcatcggtgcatccagcaaccggcttgcagcggaattcgtactggagattgccaagatcatccgtgcttactccggagccggcatctttgccacacaggatttaaacgacttctttgctctggatgacgggaagtacggcaagggtatcatcaataactgcaagaccaagattatcctgaacatggaggatgaagaggcacagcgggtgaagactatcctgcatctatcggaaacagaagtaatgaacatcacccatttccagcggggcaacggtctgatctcaaccaacaacaataacatcactgtggaatttaaggcttccaatctggaaaaggagctgattaccacagatcggcaggagcttctggaaatccttgcgaaacagaagaaacaggctgtgtaacttttggcagcactgacgctgcccttttcatttgaacttcaagaaggaggagacttatgttacagacatacaaatcctataccagacggacgctggctatgctgctggcagtccttgtcgcagtcggcgcattgttttccggcagttttccggttcatgcagccgacggcaccatcagctataaggcaggtgccaatatcccttacggcagctattttacctcccgcatgagctttgacgggagcaatactgcctactgcgtggaaccactgaagaaaacaccttcctctggttcctattcctatgaccttttaagccagaactccccgctcagaaaagcgctctactacttaaacggcggttacggctacgataaagtcgtcaaggataaatatttcagtggctggagtgatgataacagctatgtcatcggacatctggttgtcgcttacatctatgccggtaattccgctgacaccggagctttccatggcgccccgcagtcctatattgataaagcactggaagtagccagtgccattcagggacttccgaacccgccggaaggcttccgggcattcatcgttccgggacagggcagccagaccattgccggaagctggtatcaggttccaaacggctggatcgaactgaaaaaatcttctgccaacggaagcgtatcggacgggaatccgaattacagcttaaagggtgctgtgtatgggatctatcagggtgagaagctcatccagaaactgaccactgatgaaaacgggtatgccagatccggcgaactggaggaaggcgattataccataaaagagctctctgcttccaaaggctacattgtagacaccaaagctcacaaagtcaccgtaaaagcagaacagacttctgctgcaaacgtaacagatattccgcagaataatcccatgaatctggtgcttgaaaagctggatgccgaaacaaagaaagcctccccacagggagcagcttcccttgcaaacgcagaatttacagtcaagttctataccgagcagtctgacagtgatcctgcggaagctggaaagaaaccggcacgtacctgggtattaaaaacagatgtttccggaaagatgcattttaccaaagattcctttgtaagcggcgatgccttttactataccagtgatggcaagaccgtctgtcttccgctcggtaccataacggtacaggaaagcaaagcccctgccggataccagctcaatccaactgtcttcgtacagaaaattacaggtgacggtaagcaggaaatggtttcggtataccagtcttctaccatagaagaatctgtcatccgtggcggagtgaagatccagaaacgtgacagcgagaccggagaagcaaaaccgcagggttctgccactttggaaggtactgtctttgcgatcactacgttaaatgaaaatccggtattagtagacggaacatcctacacgaaagatcaggttgtccttacacttactgccgataaatccggttctgctgcaactgcaaaagatgctctcccattcggacattaccgtgtggatgaaacaactgcaccttccggttatctgaacagcggaaagatctctgtagaatttgacatcacagaacagggaaaaatcgtggaactgactgcaaaagacaattccatctccaatcaggtcatccgcggggatctggaatttgtcaagattgctgacggcagccagaaccgtctggcaaatgtgccatttaagatcacttccaaaacaacaggcgaaagccatgtgattgtgacagatgccaacggttatgccagcacttcctccaaatggaacaaacataccgcaaataccaaccggggtgagtcttcggaagacggcatctggttcggcacctccaaaccggatgattccaaaggcgctctcatttacgatacttacactctggcggaacagcgttgtgattccaacaaaggcatggatcttttaacctttgaagtcaaggtttataaggattctgttctgatacaggttggaactctgaccgatgatgccattgagatcggcacgactgctctggatgccgagaccggtacacacatgagccagccggcaaaagaagtgaccattgaagacgttgtggaatacgaaggactgaaaaagggccagaaatacaaactgactggaaccttaatggataaaaaaaccggggaaccaatccttgtggatgaaaaaccggtgatttctgaaactgaatttactgcaaagaaatcctccggctccgtcaaagtaacctttacctttgatgcaacttccttaaagggaaaaacaaccgttgtcttcgaggaattatatcaggatgagatgcagcttgcagtccataccgacatcaacgatgaagaccagaccatctatttcccggaaatcaagactactgcgaaagatgcggacacgaactccaatatttcctgtgcaaaggaagaaatcacgctggtggatacggtttcctttaaggggctggttcctaaccagaaatatgaagtgactggaactctgatagataaagaaacaaagaaaccagtcgaagcagacggaaaaccggtgacagcaaaagcatccttcaagccaaaagaatccgctggtacggtagatgttacctttacctttgatgccagctccttaaaagggaaaacagtagttgtctttgaatccctggcttacaaagacaaggaagttgccgtacacacagacattgcggatgaaggacagactatttacttcccggaaatcaaaaccactgcaacagatgctgcttccggcacacactatgcaaaaccggaaaaagaactgacgcttacagaccttgtggaatacaaaaacctgatcccaggcaaagagtacaagctgacaggaacactcatggatgcggaaaccgaaaaacctttcgatgtggatggcaaagctgtgactgcagaaacaagtttcactccggaagaagctaacggcagcgtagagctttcctttacctttgatgcctctgcactttccggaaaaacgctcgtggcatttgaaacaatgacttttgaagatcacgaagtagcggtacatgcggacatcaaagatgccaaccagaccatctacttcccggaaatcaaaaccacagccaaagacggcagtgacggggatcaggatgtctctgcttccaaggaagcgactatcgtagatacggtcacttatcatggtctgatgcctggatctgagtacaaagtcatcggaaccctgatgaataaggaaaccggagaggctttgttaaaagacggaaaaccagttaccgctcaggcagaatttaaagcagaaaaagctggcggctctgtggaagttacctttaccttcgacgcttctgctcttgccggacaggatgtggttgtctttgaaaagctctactatacagacggaaaaaccgagcatgagattgcttcccatgaggatctgaaggatgaaggtcagaccgtacacatgacggagcttccgaaagaaccggagacgcctccggtagctccgcctgtaaagaccggcgatgagacgccgcttctcctgtatgccggaatcgccatagctgcacttgcaggtgcaagtgtcctgggcatcgtttacttcaaacgcaaaaagaaacatcagtaactcataacgaagactcctgcaggcagctcccacatggaactgcctgcttctttagtaggtgatgaatatgaaacacccccactgcaagacagatgccaagcacatccgtcattttctgaacctctgtgaagggaactggcactcctgtatctacgtctggtgccgcacttgtaacgcacaggaaagctgtgagaactctggctttttattccatccggatgaaacgggaagcccctgcatcctccctctttcagatgcagcgcttttgtttccccggataccggagccaaccgaatgtaccggaagcatgagcattgctgcttttacagagctttatctgccctatctggccgctcagaagctgcctttaaagccatgtcccattccggcactgctccggcttcaggagaaccagcaatatgactggtaacaaaaagttgcactttcaggctcttatacgtacaggatatgtaaagaaaggaggcactgcctatgttaaacgtaatttcaatcatccaatgtatcgatcaggtctttacgaacctgatatttattcccatgatttttgtcctgtatgtgaaattccgtccgaaaaagccatggaccagaaggcgcaggaacacttacctgctctgtctggtactgatcagcttattcctgctacggattttctgtgagaagttcatctttacaccggttaattatccacgtttcacagacagcggcttattcccgctcatccgagcaattttctatcccggcatctgaaaaatggggattcgtgccatttagtccgaatctgggatcagtatccgcttgcgtcctatgggaattcatcacctgcttacttacaatataagtatacagtacgtactggttattcacgtacacgttacgtatcgtgtatgtacaagcgaggtgaaaacagatgaagaaaccaaaaatcatccgctgcccttactgcggcggaacagcaatattaagagatgcatcctttgtatatggaacgcattctcatggcggacaggtttatgtctgctcccactatccatcctgcaattcctatgtcggggtacatccgggaaccaagataccaaaaggaacgctcgccaaccgggagcttcgtcaaaagcggattcaggcacatcgaattttcgatcagatctggcaacagggcatcctttccaaaccggaagcatatcgctgggtggcagataagttctgtctgacagataagcaggctcacatcggacagttcagcaactatatgtgcgaccagctcattcgggaatccgcagatgttttaaagaacaaccatattcccttccgcctccgggcagccagctgaaaggcggtgattgatgatgaccttaccactaaataaaaagcaaaaacaactggtggaaaaatccatggatctggttccgatcatgattcgttccatgacccgcaccgctgcctatgtaactgaggaagaacaacaggaattatgtcagattggatatctggctttgtgccggtcggctgtcggatttgaggaaggaagatcattccagccttatgccaaaactatcatccgtcatgccatctttgactactggcggaaaattgcccgtgaccgctccatgctctgttctctggacgaagcatcatctgaagatgaacatctccattatcgtgatttgttttcctacgaggatacacaaacaactcacccggaaaaggacacaaaccagaccttgcttcttgagcatttaacccagcttggcaccggacagtcctcaactattcagaagggaattgtagccctctatctgcaacagcagggatataccagctttgacttggcaaaacactaccaagtaccagccaatcgtgtacgggcatggcagagcaaagcacggaaactattacagcaggatgatgcactctatgcacttctgacttaaccttgaaggagggaacttttatgctgacactttatactgctgtcggaaccttaaaatttcaaaaaacgacaggcggaaaatccattcctcttgtaatcaacgatggacaagaatatggactatcggatgacgagctgctgctctggagctgtcttgccttccagattctgacgctccatgaactccaggatgcctataccctgcgccagatacagaaagaaggtccgaaaggcttatccttccaacactatctgaaccgactttccttacgcggtctggttgtaagcggaattggactgacaggggtggatgccttatatcgccttctcggcagtctgaccattattcccttgaaggatacctttcccatccggctctttggctgcgttcagctttatctggaaggaactattggtgcaaaagagtttggcagatatttaaagaagaaaccctcttcaccgatggaagataccattctgaagctggctgataaggtatccctcacgaccgctgagcttgtcacaagtatggagcaggaaaaagtaatccacaacgaatcggatattatggatgagttatacacagaaccggagacaacttaccaaacacttgtggatgatgtccagattcaccatacccagtatccagtgctgcaggctattgctaatttgtacctgaataaacaaatcacatttcatacatgttaaaggaaggaaccttatgccaaaaccatttttcacaaagctggttgccatcagtgcaatcggctttttctgtgtactttttgggtgcatcttcgggatcgccacccatgaccggctctttatcctcatgagcctcctcatcggaatctgcagcatcttgcgtgcactcagtttctaccacctgatccatacacatgcttatctgtcactggacgtaagctgcacgaaacgggaacagacactcttcgggaaaaaccagcaatattggtttgccagtgataacggaaaggaatacgccttctcactggaaaagaatatcaaactcctagagggacatcggtatcggctgtacttccggaaaccacagcagggaacagggcaatcgatgccatgtgccggagatattctcggatatgaagaactcaccgatcaactgccggaacttccggatacatccgtttagatagaaaatgagccgcccgtactgcatcacccctacagttctggcggctcattttattataaataacctctcttatttctatcaaacaatagtgtttgtatccgcttcaatgccatgagcatttacttgtgtgtgataaagaagcaatagaagtgtaaaaaattttgccgttcctatccgacacttggccattgtgtcggataggtcgggcggttattcgggcaagtcaatcttgccgacaaagctgtaataaatctcaatgtcctgcctgcgggtgccgttctcatcatagctgcactcatgcaccacaattttctcgatcatttcccgcaagagagtgggggtcagttcttcaaaggcaaggtgcttgcggacaatgcccataaatttctcggcgttgacggtagctgcctgtgacttgtccagttcggcttgcagggcggcggctctctttttcagctccgcttgctcggcttcgtagtcagccgacagttccatgaaacgctcatcgctgattttgccgtttacattgtcctcatacagccgcttgataatgcggctgatttcagaaatgccgattttgtgcgcttcttccggtgtggtttctcccaccgcaaaggattgtatcaagtgccgccctaaatgtgtgccgcgatctccggcagcttcccgcgtccatgcaaactcaatatcggcggtttccagcccgcagccgaaagaggacgcaagcagcttcccgtctgtcttttcgggatttaagatatagtctatcgcagcctttaaggttgatttaatagggtgcgtctttgtaaccgccatatctcgtccaccgcctttttaatgtcctctatatcctgcctgtaaaccgtccccgtcgcattggcgcgttttgcaatttggttgatgttccggctcaccgcttgcagttcccggatatatgcttttgtgtcgcttcggtcaacgacaagaatatacccgtctatcgccattttacggaagtatgccccatactgctttatgggaagctgcttcatcttctcgtcgatcagccgcttttcttcttccgtaacgtaaaacttcatctgtatatttctctttcggttttccatttccgcaccgcctttcggtataagggtttgggattatcccaacaagcattttccgcaaacgggtactcgtttgctgtgcttgctatctactccatacccccaccgaaaggcggtatttgttgcgcgttcctttgattttggacgcaaaaaaagattgcagccgccatgcgctgcaatctcccgatttctcatattgtgaggttaatcctctgctttttcgacttccgttatctcccttgctgttgcggttacaatccgtatgcctttatcgctcataccgtccagcagcgcgtcaagctgccgccgcccggtggatttctccgcattgctgttcgggaagaaaaattgatctaccgaaatatgataccgggttacaaggtcatagaatacctgtaaactcggctgttgtcccttgttctcgatattcgcaaggtagcgcggggaaatatataactcgtcgcttacctttttgcggctctcgccgtattcatttctcgcggcttttatagctgccccgaaagccttaaagtcgtacaatggtacgggtctttttgccattttcattcaccctgttacattttacagttcacctttctttttggatatgtccacacaattcatatcattaggttaaatacttcctgttgtgtattgacagtagactgattttctgataaaataaaatttatgtaaaaggaggcggcgtttatgttgcatagcatgcgtattagataagcattgaaaaaaaggattttcccattttcaacatgggcttttttgtcatgcttattttgcggatgctatacaaaaaactaacgacgtatagatatagtatagacatagtgcaagctatgccttagttttgttgtactgctctgtgcattataaatgcaggtcaatgctcatgttgaggattgacctgcatttttttgtgtaaaaaggacgagtgaaatataatgcttaaaaaatattggataaaatgtccgatttgtaacggaaagacgagagttcaagtatttcataatactgtattaaaagattttcctcttttctgccctaaatgcaaattgacgcatatcattgatgtagaaaaattagagattgtaatcaaaaatacagaaaaacaaacttttattatttagaagaaaggatataaaaatgaaacgtttacctaaatatacgcctgcggaagtacggaatgatccatacggatttacttacaaagaaatgtcggaagttattggcgagaatgaagcaaaagccttatatgaagaattatataagcaattaccacgcaaaaaaaatctatcaatgttggtaaaaaatatttgcaaaagcagtgatactgaaaagtatgtttacgaactgaaagacaacaaatacattgaaacggtttttatcaagcggcgagatggtggaactgtttgcgtgagcacacaagtcggttgtcctgttggttgtattttttgtgagtccgggcgaaatggctttgttcgtaatctaacatcgtcagaaatcgtacaacagattatattgttgcgtcgaaaagtaaaccgtatcgtttttatgggtatgggagagcctttattcaattatgacaacttgataaaagcaatccatattctccgagatagatatgggctcaactttccaaccgacggcattaccatatcaacagttggtccggtcgatcaattaaaaaaattgcgcgaggaacatcttaaaattcagttgacaatatctttacacgcagcaacacaatctgcaagaaatcgtattattcctcacatgcgcatatatgctattgaagatgttgttaagcaagccttatcctattctgaaaggcataatcgcaaaattgtctttgcgtatttgcttttaccgggtataaatgaccggccctcagatgtaagacaacttgcaaaatggtttcggggcaaaaaagttatgattaacgtgttacaatacaacccaacaagcaattcaagaattaaagcaccacagaaacgggaaatagttgcattcaaacatcaattagagcaagcaggacttgaagttactatgagagtttctcatggcagagagattaacgcggcttgtggacagttagctaacacatataataaattcaaaaaaaatgattaaaagtgccagacgcatagacgcagagccgataacgcattaggtcaaaaaacctatgtgttatcggcttttttatttaatattgcgcaaaagccgctgttccctattatagaatggattgcgggtagtgtattaaagtcgcccttttttaaggatacggcggtatcggggaggtatcgccgtgtccatttttatttactgtaacccgcctaatgctttgcggtcaaaaaaagctatgctccgcaagcgggatattccggctatgaatgtgaactgtcaatacatttagctactgcttacatttcctttgcgcccgtccgcgtcttgcggacgggcgcattttgcttttttcaacttttttctgaaaagcgcactcaagagccatctcccgaacgggtacggagcgaaaggggcagagaggacaagcccttaactcccgtcctctactccacgcgggaaggaggtgaactctatggagctatcttcttccgacaaggaaagaatacaacatcagtacgacgcattagcaaagaaaactttggtcggcgaagcgaaaagccaccgccgcactcttgcgaaacgcgcagcacgcgaagttactttttcggatttgagcgaaagcgaactcgcgcagcttttcacaacggacgaatacgaaagcgattatttccgttttcaagtgtccggctttgatgtactcgtcaaaaatgaactgcttgccgaagcccttaacgctttgcccgaaaggaaacgcgacattatccttttgtcctacttcttggatatgagcgacgcggaaattggcgaactgctgaatgttgtacgcacgacggttttccggcacaggaaatccgcgcttgcgaaaatcaaacagtatttggagggaaaagcagatgatgaataccgttaggaagtctgaaaatctgttgccgttccctgtcatttccgcagcggcaaacggcgacacaaccgccatgtgcgcgatcttgaagcactacgagggttacatagcgaaactttgtacccgcacgctgaaagacgacgcgggcaatacctattcctatgtggacgaggaaatgcgtaacaggctgcaagtgcgccttattacccgcacccttgcttttcatgtaggataatcttttagcccatgcggggagcgtgtcccctttccacgcttcccgttatgggctatttgtcgttccgcaaaagcatatccgctgttgatgtgcttttgcaggccgacaaagcctattgttctttgacaaagaaagcggcctttggtgcgcagcataacaggcaaacgggtacattccgtctgtaccgagccagtcggcgggtacgccatgacagcttttccccataggggaaaagccgagcgagaactaccgcgccgtaaaacaggtttagcagcttgtgggcgacgacatacaaggcggcacaatgatactcccgcgttgaacaccctcaaagtattgcgcggcgcacccataagcatgggccggggtgaaactcccgtgaggttgcagctaacaaccgcccgtttttgccttttgacgaatatagtttatccatacaggaaaaggaggtttttctaatggataaaaaacagacaattacaaccgaacgcaaaatagggaaaatcacctatcttgttcaagcgttgccgagtgaaaaggcaaccgatacaatccataaaaagattgagaaactcattgtaaaggatttgcagaaaaagcccggaaatccgggatttttagcgtccgagtagtgcattaggcggcgggatatggtataatgatagcaacacattatacctgtttattcggctgtcggaaaggaggactaatgttacagtcgaataaaatcaccgccctttactgccgtttaagtcaagaggatatgcaagccggagaaagcggaagcatacagcaccaaaaaatgatacttcaacgctatgcggacgaacaccattttttgaacacaaagttttttgtggacgacggattttccggcgtgagttttgagcgcgaggggctgcaagcgatgttgcaggaagtggaagccggacgagtggcgacggtcattaccaaagacctttcccgtcttggcagaaactatctgaaaacgggcgaactcatagagattgtatttcccgaaaacggagtacgctatatcgcgatcaacgacggagttgacacagcgcgggaggataacgagtttacccccttgcggaactggtttaacgagttttacgcccgcgacacaagcaagaaaatccgcgcagttaaacaggcacaggcgcaaaaaggcgagcgcgtcaacggggaatatccatacggctatatcccagacccgaacaaccgccaccaccttatacccgacccggaaaccgcgccgattgtcaaacaggttttcgctatgtttgttagcggcgtgcgtatgtgcgaaatccaaaaatggcttgcggaaaacaaagtcttgacgattggagcgttgcgctatcagcgtacaggacaggcgcggtatcagcgggcaatgatcgccccctatacttggccggacaaaacgctctatgacatattagcaaggcaggaatatttagggcataccataaccgcgaaaactcacaaggtatcctacaagtcgaaaaagacccggaagaacgaagaagaacaacgctatttcttcccaaacacccatgagccgcttgttgacgaggaaacctttgaacttgcgcaaaagcggattgctacccgccaccgcccgacaaaagcagcggagattgatattttttccggcttgctgttttgcgctggttgcagacataagatgtattaccaacagggcgtaaatatcgagccgcgcaagttttcctattcttgcggcgcatggcgcaacagggcaaggacaggcagcgagtgtacctctcattatatccgcaaaaacgtacttcttgatttagtgctggaagatatgcggcgggttttgcggtatgttaaggaacacgaacaggactttatctgtaaagctaccgagtacggcgacatggaagcgagaaaggcattagcgcagcagcaaaaggaacttttcaaagcacaggcgcgtatgaccgaacttgacacgcttttccgcaagctgtatgaggacaacgcattaggcagactgacagatgaacggtttgtgtttctaacttccggctatgaggacgaaaagaaatcccttgccgcaaggatagacgagttacaacagcagatcgcaaccgttaccgagcgaaaaagggatatatcaaggtttattcagattgtcgggaaatacagcgacatacaggaattgacctatgaaaacgtccatgagtttatcgaccgtattttgatacatgaattagaccgggaaaccaacacccggaaaatcgaaatccattatagctttgtcggacaggttgataccgagcaggagccgacgcaagttgtcaaccatgaccgccgcaacatggtagatgtaaaaagtatcgctatctaaccccagcaaagttcgcgccggaaaaaccgtcgtcggtgtaccagcgcagattggtaaagccgttctgttttgcgtaggtttcgagtatccttttttggttcgatatggaattactctcgccttgcaattcatcctcgtgggacaatctcggataaagggcggtaatgaggttttgggtggcttgtcttaacataaaatcctccgtttccgacagccagccccactattccgtggtttcattgtaccacggaacggcgggggctgtacagcggcaaaagcgttaaatttgcttctttacagcttttcaattttccgatttttatggtatgggttgtcgtcccatatttgcagtagaaaagttcataactccgtggtatactctgatttaacaaaaaaatcagaagttaaaggagaaaacatgaagtatacaatagatgaattaaccgcggccaaaaggcaaattgattcaactctgcacaagctaagagaaacagtaaaaacatttgaatcaaaggataattccgagcgttataaatcacaaatcacattggcaaagagaagaataaaagcctttgaaattgcaaattattttatagagaatgagattaagaattgctaaagcacttccgattttcgttccagcggtcatgctccctggcatggccgcttttccatgccccggttcacgccggataagtcggctcctgtgtagcagcggcttccgcttccagtacccgcgccattttgtcggcggctgtggttgtggtgtctttcttgaaatagccggacacgacaaggacggaattgcccatgcggatttccgtcacacagtcagggcggcgggtggtgcgggtgtcgtgctgcttgttatctgccataggcaatactcctttcagtcggtaatcagtttcttcatgctctccattttccgcttggcggtttcctgccggaagttgtcgccggtaaagcgtaccgggacgcacatggaaagcaggcggtcataaatccgggaatgggcggtgtcctccgggttgtgcaggtcgtccagcgtaaggttggtcgtgacgatcagcggcttgccgctgcggtaacggctgtcaatcacattgaacacctgttccagcccgtattccgtcccgcgttccatgccgaagtcgtcaaggatcagcagcggataacgacaaaggcgggaaatgtactcgttgcgcccctcaaagctggcggcaaggtcattgaggataagagcaaagttcgtcatgcggacggggatttctttctccatgagggcgtttgcgatacagcctgcaaggtagcttttgccggtgcctacgccgccccagaacaggcagccgatattgtctgtccgcatatcttcccaatgctccacataccggcgggcaagcccggtctgcgggttcctgccgttgtcgttctcgaaagtccagtcccgcatggtggggtcggtaaagccccggcgtttcagttcttccacggtgtcaaggtgtctgcgccgcttttcggcggcttcccgttcctcgcgggcggttctctggcagtcgcactctgccgggtggcggtcgcgcccgaagatagcggccttatccggcgcaaaataggcttctttcggcttgcggcacttgccgcagtacagtaaaccgtcctcgccggtgtagtcctccggctccgggatggtggtcgtcatattctccaaaaccgcgttgatttcattcttcataaactctcgccctccttgcatgagtagtctggtatgccctttttaggggcttcctttttgtcgttccccgcccatatccgcagggcggcggcatagttctggtagcttttcccgttggcggcaaggtagcggctcatttcctcgatgaaccgttccagcctgtcagggtactctgcctgcaactcgtcgtattcggtctgtgacagaaaaatatttccatatcggccatagggcgcggacggccccccactcactccctttgtttggctctctgtaaggttgtttatagtagtttggttaggggacggttttccgaccatcataaggtcggttttctgaccatcagtaggacggttttccggctctatgaggggcggacttccggccatcagttggtctgaaaactgtacctgtggcactggcggtactttgacataaagccggttcggtgcggagaagccgccccgttcccgttccaacagccccgccgtgtccagttcattaagcgcccccttgatggtggtgctgcctttatccagtatttctgctatctccgcgatgggatagataatataaatcctgccctcgtcgtccagccacttgtttttctgggagagggtggaacggtctaacagcagcgaatacagcagcttggcggtctgtgaaatctccattttcagcaggaaacggggatacggcagataggcgggcagccgcgtgtctgccctgatataatcagcgataggatcacctccctgtgttcgggttgattttggcgtattgtcacgcattaaaacgccgtttccgggggaaaaggataaatgtatcgcgtaccctttgacacccacgaaaaaagccttgatttatgcgggtttgaaaggctctaaagcgtgacatctctgcctttgtttccgctttctctcggcggctttgattttcttcatgcgcccggcgcagtcggggcagtattttccccggttggatttggggacaaaggccgccccgcagacggcacaccgtttccggcttccccggcacaagagggctgcggccagctccccgtcaaggggcaggacagccacacggaaccagtggcacatgagggaaaaggaaatgctctggacgcacacgcaaggctccccgtcgtccaatagcaggcagttcccctcatcgtagttacagcactcatgtaccagccgccgcgcccgccggtgctggcggtagtccatgtggggcaggttatcgctcatggctctgctcctttctgcggtgcggctcgtcccggcgcaaaatctggtcgatgttccgcttgacggtctgcaactccttgaaccgctgtttctgttcgtgataggtgttatacaggccgtctttctcggagataagctgctcgatctcggcctgcaacgctttccgggcgggcagcttggtaatgccatgcgccttgaaataccgggctgctgcgtcggctatgataaaatcgctctcatgggcctgccggtatgcggcgcgggctttctcggatttctgtgcccgcagcccgtcgcgggcggccttggtctgggcgtaggccaacacctgccgctgcaacttctttttcccttgcagcttcgtttccagtgctttcagttcgccgctggtctggcgcattttctgataggcggtgtcaacggcggcttctaactgctccggggaagtaaagccgtattgctggtagacggacagcgttttggcggcctgcttcagattgtgtatcttcgcccagcgttcatagccccggcctttgccctcggccattttctgctcaatgtccacaagccgctgcactccgtcctgtttcggggcggctatctcggctctggcaacctgcaagcggtcttttatggtgcgtgggggatcgggggatctggctggcgcttcggctgctctggcggcgttttgctctaaaacggcaaagacagcggcgcggtcaaaatcgtcgcccagcttccgggcggtaattggctttgtcctgtccggcgtgaggtaggaaagccgcccccggctctccttgacggtcacaccctcctgcagcaacagagaggaaaactcgtcaaagctggcggcggtggcaagggctttccgtagggtctgccgcagcttctccttgttcgtttcaaacttggtctgccggggcgtgatactatcggcaatcatgggggcgttctgcttgtccagcgcggcctgtccctttttctgcgcccaatactcccggtcggtgacgcggttcttgctgccgttcaagaggtcgatttgataaagcccctcccggtggcacatctccatgacttcggatttgaagtagcgcagggcagcgtcggtacatcggtgcttgcagccgactttcgtatcggccggcctgtccatgtagggcaggaacggcacttcctcaatccgcaggctgtttatgacgatatgcacatgaatgttgccgctgtggttatgcccgtccgggtgggtgcagacaagggcctggtggccgggaaaatgctctttacagaattgttcccccaacgcctgcgcccggtctacggtcaggccgttgtccggcccgtcccgcgggtcaaagctgatgatgtagtggtggcttttcacatcttcccgccgctggtttttctgatagcggagattggcccgcatacacgcaacggcaaaatcctccccgtcgcagttcagcgtggacagccggtagtcctcgcgggggataagcctgccggtttcatcaaggacgggcttcatggtaaactcgtcatgctcaaagagaagatattgctcggcggctccgtagtcggcgtttttagagttgatatgcttgagtgttgccaaccgcgtcacctactttcttgaggacttcatacttgaggacggcaaggtcggatatggcggcgcgtacctcgccggaaagggtgttgtagggtacgccgtattcgttcagataccgggcaatctgattgaggttgccgccgatcctgccgtactcggctgtcagcttcccgacagcggaaagcaactcgtcattgaccgacgacacatggacaaccgggcgtatggtcgcccgccgtatcgcctgccggagaaattcggactggctgataccatagggcgcaagccgcgctgtgaagtcggcatactcatcttcggacagccgggttttcacaacgcggctgcggtggggcgtgttgtatttctttcgcatggtgtgacctcctttctcgcccgtaagggcgcatgagcagggtttggggaaggcactccccaacaagtttccccgcgaggggcaaaactgcagaattgcggattttggcaccgtggtagaaacttgctctccgtgactgcaaactttctctcacttccgtccgccacttttttggaaaactgcaaccacaaaagtttgtttctctttttctgctactactaatcctgtaaagggcattcctgcccgctttcgctaaaatgacaccggacgcagtggtttctacccggtgttggagaaatcctttctctttgccctctactacgggtaaatgctccaaatgccaaacaccagggcagaaaaattccctcctcgcttactactacaaccggcagggggcaaaatggccgggagcggagccggacaacaaaaaaagcagtaaatctttttcaagacttactgctttcgctggccgcgtcggtggcggctggtattcagtttttatgacttgtccggtggttcgtcaagccggaacttgaattgacagtcaattaaccgctgctttacatagtcctccacctcggcgttgacctgcccgttcacttttgagaaatagcggatatatccggcgtagtggagcaggacagcgttcacggcttctgggtcgccctcacgggctttgaggattgtttcataggggagaagtctactcataccggctcacccccatttcttcgcgtagccgctgcaaggcaagctggatatgccgccccgctgtgctgcgtgaccggccaatacacgcgccgatcacgcgctgcggctggcgcagaaagtaatagcgcaggatttcttcccgcgtctgctccggcaaaacagagatcgcgtcggcaagggcggcgttgcagagcaggacggtctgaccgcagacggtaaatgggtattcctcgtccggctccgacgcggcaaactggacaaacttctcgttcatcagatagtcaagggaaacttgccgttcccattgccgtttaagcttcaaaatcttgtccaaggcggcacagcggataacagtcttgcaaaaggcgttgtacctgcgctggatatattcttgataggctatctggtcggtcatggaaattcccctttctgaataatagtgcggggcggtggcacttcttgctgtcgccccttgattgcctaccagcaaaggcgggcggggctgtcaacggctgcgcatatgcgccgttcatcttgaccgttgactggctcggctgggtttgctatttacccgacaaacttgaatttattttaagctatcacgttttaccttcttaagccttactatcattaccataggaatttctttgttggttttaaaacattcttcataaaatccatcaatgacaaatccagctctaaaacaaaggttaaaaatatcttgtatggaacgatgataataaatctgctctttcggttgcccttcaatcgctatatcatagtaactgtgcggtgtcatatatttttcagtcaacgtgacaaaacaagggtgttgcgttgcaaagacaaaaattccgctttcctgcaacagttcataaacagccataagaagtggttcaatatccgtaatatccataattgccatattagaaactgctttcgtaaaggctcgatttctttttaattctaatatactttttctatcggtcgcatccgccacacaaaattcaatttgttttgcatattgtgattgccgtcttttagccaattctatcatttttttgctgtaatcaaaagcgacaaccgaagcgcctctttgtgcaagatacgaagaataatttccattgccacacgcaatatccaaaatgtaatccgcaggattaggagatagaagttccgttactttgggacgcactacctctctgtgaaattcattagattcgtcacccattgcattatcccaaaattgtgcgttctcctcccagatttttttactttcctctgttcccatgttctctcccactccccaaatttgcttttttgcttccattaaatcttccttactatattccattgttaccctccataacttctgattgttgccgtcttgacgattatgtatctttacattaccttctgaaacatatggcgcaccttgtccaggcggctgtttggacggcggggctggatgaccggctgaccgacagcggcctgatatcctttcagctctgtaaggcatacgctccgcccgttggtgtaaaaggccagatcagtacggtatgcctgtatacagcgggcgggaatctcgccagtaaagacaacttcatccttttttacctgggccgtttcgatggtggcacagtatttcggtgcatcatgataagccctggaaaggtattcctggggcgcatagaggatgaaggagagataaggttccagcagctgcgtccccgattccttcaatgcctgttccaatacaatcggggccaatgagcggaagtccgccggcgtgctgaccggactgtaataaagcccgtattcaaagcaaatcttacagtccgttacgttccagccgaacaagccctgctccagcccgtaacggataccatccctgacagcgttttgaaaactctggttcaagtatcccagcgaaacccggctctcgtattgtacaccggagccaagcgagagtggtgtaacagacagtcctatggatgcccaaaacgggttgggcggcacctcgatatggatggtgtggctggctgctttgagcggccgctccatataaatgacggagggttcctttaccactgtttcaagcttgtatttttccgacagcaaagcggaaacaacctccaactgcacccggcccaaaaaagaaagaatgatctcatgggtgatggaatccacttcgcaacgcaaaagcgggtcagtatccgcaagttgcgtaagagcgtccagcagccgttctctttgcgctgccgttttcggcgcaatcgtcgtccgcagcatggggagggggtcctcgcgccaccttttacgagggagccgggtttggtcccctaatacatcgtttaacctcacgctgtcgctgggaaggataacaatttcaccctgataagcggtgtctgtccgaacaatttcccctttggatggaatacgcatctctgtgattttcagcttttctctcccggccagggccaccgtatcccgcaggcgcagcgttccgctgtataaccgtagatagacacgccgctggccgcaatcggtgtactcaaccttgaaaacgctgccgcatagggcggcgcccccctgttccccaatcggttggaacagccctgtcaccgcatccatcaacggttgaatgccaaggccatttttggcgctgccatgatagactgggaacagggaggcgtcttgaacccgctgctgttcctcccgcgcaagtttttcccggctgattggttctcctgcgatatacttttccaataattcatcgttattttcgatgaccgcatcccatgcttctatgtcggtattttcctccaggactatttccggggacagcgacaccgtctgcttgatgataatatcggcggagagcttatcccgaacagactgaaccacgctctgcaaatcaacgccagcctggtcgatcttgttgataaagataacggtgggaatgttcattttccgcagggcatggaacagaatacgggtctgggcctgcacgccatctttagcggagatcaccaagatggccccatctaaaacagccaaagagcggtacacctccgccaaaaaatccatgtggccgggcgtatccacaatgttaactttacatctgtgccactggaaggaagtgactgccgcttgaatggtaatcccacgctgccgctccaaaaacatggtgtccgtcctcgttgtccctttttcgacgctccccggttctgaaatggctccgctggcatatagcaggctctccgtcaaggtcgtctttccagcgtctacatgggcaagaattccaatattgattattttcatgtgattgtcctccctttacagccccaaagggcataaaaatccccagcagtaaaatacttttaccactggggattataagttgcggacatacacatatacagcatacacctgtttgtgattgctgtttttggggatatgtcaaaattgataaggcaaaagtattcttaaattgggtacaaaaaactaagcccctacaaaaggagctatcataatcctttgttcccactatttgattatagttttatttaagaataccttgccgcatattttttactccttttctggattaaatcattgtatcacatcagttttaggaaagcaagtacctaaaagaaatttttcttccccttatatgtaacaatcataccggcttcctagcgttcagaatgttttctgctgtctgctgtggtgtttggttggaattgtccaaccaaaagccgatccgtggtgttgtctgcattttactaaatacaaattcaatgtatacagaaagatataaggagtgggagggattccgccgtagttggcattgtaggaaaatccaaaagtttagattttcccacaatgcttatcttttggtctttggttcggaatagtgtagtgctggcggtctatctcttgttttcggttgcttgcttccttaccgtacatgagcatttgctccgggaatgtcttagttaaacttgaaagaattagattttcattctcattacacaaatattattagataaccaattcagaaatatcaatgctcgttttatagttttgttttactccgccaggagaagtaataaaaatcgtagcatattccccattttcataaagggtaatttcttttatatctttttcttcatcttggttcgtagtatcgcaataaaattttatggtatatttagggttcatacctatgcttttttctgtctctttccatgattttatatttaaagcagaaataaccttgtctatattatgcttatcatcatactttaccagcaattccttatttgcggcatcatatatctctataacttttacaccttttacataattgtccattctctgcctttttccgccccgccagatacctgtgccggtatttcagctctgcatactctgtgatccgtttcatgtagactgcatcataagctccgcctacaacaccaaccaccggaattccctgtaagaacttcatatacagaagctcttttgacaaagcgcccgccgtttgttcgatctgctccttatcctgatactcttccggcagtattccgtttctgataaattcatttactttcccgtcaatctcacaaagtgtatccccataggatactgctccccggatcaataataagataaaatatttttcttccctgctttcatagctgtatccatactgcagagcagtctcataaatattctttaaaatcatccctgtaaataccggaatatccggcagaccgattcccaatacgcccatcccgattccagacacaccggatagcagtaaattctttgttcccgtatctcttgcctttttagaaaaagagcggagggatttggaattctgctttacatccgccatatactgccgcacctgataatcctgctccagttttgtccgctgatacgtcttttcaataaccccggttcctttctcgaaaatcagagcaaatgccttcgcaaaagcggtatccaatgttttctgaagtttcggcggtatcttttcctccagtttctgattcagaatgctctcccttttctctgaacgcttctgaaggaatctctgctcctgtacttccagcctttcccactccttctgaagcggtgtccttttatcaaataatcgcatcttaatacacctccgcaccaaacggcatcaatgccagtttcgccagtttaaactgctgtaaaccaaacgggattccgataatcgtcacacataaagctgtacccaacgccagatgctccagtgcaagaggcagaccggatacaatcagccagatgatattcaaaaggaacgaaccagctccgccaccatactgcacctcttttccaaaggggaaaaaactaagcgccgcaaatttaaaacactgcatccccaccggaatccccacaacggtaatacaccagagacaacctgccagacaccagctcagcccactgactgcgccgccaaacacaaaccacaacacatttcccaggcatcccatatgctacacctccccattcatccgatttttcacatcagcaagtatcttttctatccggttgatggcatcatccacctgttctcttgcatctgcaatcttgctctgcaccatataatctgccaccagcccgtccagaaagaaatccgcaaaggaaaggaagctgccgatttccatgcgcagatccaaggaaacctgcacatctcttaattctctctgaaaacgctgaatatcgcttttcgcctgttccatcaacgcagctgcgtcattcattttagaatgcttcacaaagtcactgataaagcctcctccaagcatatcaaaaatgccccagtttctcgcacttcccaacttatcccttgctgcgtaaaggctctgaagcgcccgctcccctgcctgtactgcttcctgcatttcccgtttcatcatttcgttactcatcgtttatcctctctttctttttagcagactattgcggcagattttctatatttcataataaaaaaagactcctatcatgacctctgccacaataaaagtcttgctatctcatttgctacgggtatctctcgataccggttgtcggttacaaaaccacctctttcaaggcgttcagctactcccttttttgcttgagatgaatataacatattggaaataatttgtcaaatcatgcatttttcttttccaaccgttccgcttctctggcaaatacatgcgagatatcaaacagttccggtacatctgatatggtacacacattcacacaataattgagccatggaaattcttttgtcatctgataaataactgccatggcttttgcttctgacattgcttccaccgaatgatatcccgatccctgaatatgctcaaatccgtttgcttcaaaaaagtcccttacatccgcatatgcattatgccagtcacctttcggataatattcctttagtgcttgtgtattcaggtcaaaattgatgcctttcctctgtaagctgtccatctgttagttccttataaagtctgtaatcaggttctccttttctgttccgttataccagaaacactctaacaaattctctgcaattcctacggagtttttcaactgaaagattgctgcccagaatcttccatagtcctgcttgcgtccccggtcaagataaatcctgcttccaagggctttgactgcacagcttaaatcctcctgctcaaaaatctgatctgcctgttcacacatctgatttaccgtttccggagcgagcttgcttgtatcaaatttaagttctactttatacattatactcatcctttcatacaacaaatgactgagtgactcttctctttctactgtaattctaccatgaaacctatataaagtcattccccattttcacttgctttaatataaatttttccttttattttggaaacacaatctccacacagaactcattcccttctatccgggcgctgattttcccatccatacgaagtaccagctctttcgcaattgataagccgagaccgctggaagtcttactgcgtgcttcatccgctttataaaaccgttcaaacacctgatctacatttattttttccacatgacatacttgattttttatctgtatccggatgttgttttcaacttcttccagtgaaatactgattttcttctccccgtgatccagtccgttttttatgatattctgaaaaattctctggattccctgttcatttccgttcataaacagcagtttatctgtaatctgtatctccggttcaattcctctgcccgtccattcatcgtagtaggaaaatatggtatctttcaaaatcttgttgatacagcaggatgacatttccagatgaaaagaatcgtttttaagttttgtaaaagtaaataattcttccagcatttctttcaggctgccgattctctcctgtatgatcttcatataccgtctctgctctttctggtcttcacaggtttccattaactgaaaatatccgtcaagggatgtcaaaggagtacggatatcatgtgagagatttgtatatgtatccgaaatcatctcctctttcttcaagtattccttcttttcccttcgcttcagttccagccattcgtttaaaacatctgccaactcaccaatgcctccaaaatccatttctctggtaatcagcatgttgctgtcgtgcttcatcagaaacgacaactggcggcagatgtctttcacctgccgctggtatttccaaaataacattccttgtaccagtatcactgctatcaatagcacgaaccctagttttatcatttagatatctctctttctgaatacccatgctgtcagtaatgtaaccacgattccgaacgccgccgcaatcacaactgccgtcaggcattccttattggtcggtgacatggataaaagtgcaatctttcctgtcactgtatatttcaaaatctggaaattctccacacctgccttctggatcaaatgattgatcactccgtataagacaatcatggtattcatgcacaggcagataacaatcgtcatgctgaacacgttgctgttcaaaaccaccgcaatcgccatactgattagtaccagtgcataatgaagcaaaatctgaataccaaagtatctcagcaactcgcttccattcccccactccagatatccgaagtacatctgctgtgcaataatctgaatgatgaaataaagcagcatggtaacagtcgtatacacaaacaacacggaagctttggaaaagatcaggtttctccggctccttacctgcccgccgatatttttaatataaccgcttcctatatctgcactggaaaacagcactgtaaaaatcaccagaaacaacgccacaaacttcgcctgcaggtttgcatatacctgatcaaagaccgttactttttctcccggctgtgtcggcaggaatacggacattcccatattgatggtttctggtttcactgtttctgcaatgctttctgtctgctgttgttccgcttccttgttcatcgtatcaatatccagtttcgacatggatgtggagaagaatatagctgccgccatcacaatccataccacatacatactttttgtccggaccatccggtacagatccatttttatcatattaagcattttgattccctcctgtcagattcaagaaataggtttccagttcttcactggtaatggaaattccattgaccaaaattcctgcttttgccagttccatattgacattggcgctttcattcaatcgttcaaatatatggatatggctcttatctgtaacctgatagttggtaaatcccattctgtccagaatcgggactgcctgctccggatggattaactctatttcaatccgttcactgcagcgtttcatcagttcttcgcttgtcagctcctgcagaagacttccattatggataattccataatccgttgcaatcttagataattcctctaaaatatgactggatatcaaaatcgtcatattccgttcatctcgcagtctctgtatggtatcacgcacctctgcaattccctggggatcaagcccattgatcggttcatcaaggaccaggagatccggctccccgaccagtgccagcccgattccgagacgctgcttcattccaagggaaaaatgtttcgtttttttctttccgacaccttccagtccgaccgtctctaagatatcttcgatgtatccctttttccgaataccaaacaattcacattttattttcaggtttgtatatgcattcatgttgccatacagccccggtgcttcaatcagacaccccacacgagaacgaatcctctccagttcttttcctttacacccgaacatctcaatctctccggctgtcggtcttgcaagtccactgatcatcttcaggcaagtcgtctttcccgcaccgttccgtccgataaatccatagatagcacccttttttatgtgaaggtttactttatccactgccttatgatgaccatactgcttcgtcaatccatttgtacttaataacaattcactcaatgctttcatctccttttcttatctgctgttatcatatcggataaatcctaatcaaacgcaaataaatagtaaaaaaagagtaaagattaagaatgcagacggtagccgattccccatacggtatcaatatattcctcctgcgttactgcttttatctttttccggatattgctgatatgtacatccagtgtctttgtctctcccatatagtgttcatcccacgcatattcaaaaatctcttctttgctgaagacctgtttcggatgctccagtaaaagctccagaattgcaaattcctgctttgtaattttgggaagcagcactccggcaatccggacttcaaagcgctcacggtccagttccaggtttttatatgacacgcttttatgttccggctcctgctgcatatggcggagctgaacctgaatccgggcaagcacctcctgtatctcaaacggttttgtaatgtaatcatctgccccactggtaagaagcccgattttttcatccaatccgtctttggctgtcaggacaataaccggcgtattgccctgtttccgaatctgggcaagcacctcttctcctgaaattcccggaagcatcagatccaatagaatcaaagaaaagcccgccttatccatctggaacagcatcctcgcttccgtcccggaaaaagcctgtaccgtctcataccctgctttctgtaatgccgtatataaaagattattgatatccgtatcgtcttctacaatcagaattctgtttttctgctccatttttctcatccttccattttccgatttaaacaatattatattgcacttttataactatgtccaaaattcttttgatattatccttccacctcgtctacatatgctatatatagttctaattcttttgacatatgctatatcttgtgttaatataatcttgtatttaagtttttgtgctgtcccgtcatgggagtctggaccattcatccagaagcatatgcagtttaagtttggaaaatcgtgtcattatactgccgttttatacggtgctataatggcactttttttattttaatctattttaacgcccaaagaggcagaaaggagaatttttatgtcagcaattttaacaattttagggagggccacaagagatcctgagatgcagcaaggaaaaaattccggtacggaatatgtttctctggacattgcagtttcacagcgaggccaggatggaaaggaagaaaccatttactatcagtgctattttaacaagttccttgcagaacgcttagcaaaagcaggcgtaaagaaaggaaccgggctgatgatctatggtgatctggagcttcatccgttcatttatcagaaaggaaagaatgcggggcaggcaaatgccggtccgaggatcaatgtcaaggactggcactttgtaccatccaaccgttctgacagcaataccggacatccgggtgcaaaccagaacagccagccgaatggtggtgcggcaacgcccggtgcagccggcaatggcagctacccaatgcagggaaatcccaatggcagctaccagaatcaggcaatgcctggcggctatccacagcagggaatggctcctgctaacggtgcctacacgcctcctgcaaatggcggacagtatcaggccccgccaaacggaaccggtcagccacagagcagctacccgccgcagggcagttataccggaatgccaaattacggaggtatgccgggcagtcagccaactgacggctttcaaaatgtgccggaacagatggcatcccagttgccctattaactctcaaggaaccctatgttgaggaattgcatttatcatctttgtgatgatgcagttcctctttttcatgtccggaagcggcgatttcccatccagcttccgggcttgtctaagaatcatgaatcagaaaggaatcagctcatgaaaaaatcaaatcgaaaaaaattcttacagtttgtcgtgcttgtactgtttcttgcagcacttttcgtaccacaggatgccaaccggcttctgattgcaggcattgccctgatcggtatcggagtcacgctgttcagttatcttctcccgcttttcacggaacgcctgaaaaacagggagcataagctacgaaaacgcccagaaagaactcgtcatctggaaggaacacctgatctggaaaccattctctggagacagatcaaattccagattaccggaaagctcaaggaagccttcccggatgccacatgggattttgtgaaagaaccaccgctctcccagatactggatggggaaccattacggattcgcacacggaataccggaagttataattttgcggaaattctcatggatgcccgtggcagtctgacgcttcagatgatgaccattgaatccttacataaaaaggaaccgtcagaaggaaatccggattccagaccagccgttaatcccaaatcatggtattccctgattgggaaaccgctactgatggaattggtcggtgacttacaggcaaggggctatgaaaagctgtttatcaacgagcagggagatgtctatattctgaacggcactgaaccggaagtccggggaaagctggaacatttcccgcccaaagattactggggcgaattgacggagatttttactgaagatgaattgaccacagaagagaccgagcaggcactggaactgtcctggatctcataagaaggaggaacgaatcatggcaaataacatcgtagcaacctgggggttcaaacgcaaactcccggaaccatttgaggattatacggaccatgcaatctttgatgacattgcatccaaatactgtactcagccacggaaaaaatccacgcttcatgcagctaccctgcgggcagtccttgcttatctggagctggaaaacccggttggcagtaccccgccggaaaagcttggggcggtcggtacccaatccaacaattttgttgtggcggaatatccgagcaaaaccggtgatcttcaggtggttgtctacaaccagctaaacggaaagttttacggaggctgctatactcctccgccggatgtggaaagcacaccggaaaaatacgaatttaaagactccaaacagtccggtgcggctctgctgttcgcactgatgccggtttttctggcagatgaagagtgtaatgaaaagtatcaggaattaaaagcgcaccgggacaacggttatcccgatctggacgccgctgcggaaacagcagccgttctctgcgacaacatttaccggagaacccgctatgcatcaggtctcccgaccggtggtgttaagattgaccttccggcaaacggcgtattgtcgctgatcaaaccgttaaatatccagaagggggtctatgcaccaaccgaagtgctccatggagactttcaggtgttacgtccaggaagtggatttaagaaagcacaggcagccatttccagagatgattttgttgggaaatttatcctgaccgcatcccgaaggctgtctccggaagaggaggtatctgttccgacattggcagagtggtacatcatccctccggaaatcaaacggatctgcgaacacgcaaaactgacaacggataccacacagccgatgcggaattttcttttacggggaccggcaggtaccggaaagaccgaaggagccaaagccattgcttccgcacttcaccttccttaccgctgcattacctgttccgcaaatacagaggtattcgaccttttaggtcagattcttccggatgtggacggaaaacgcacccggcttcagcggcagtacccgtcttttcaggaaatccagttagatccctccggtgcctatcagaagctgaccggaaactatgatgaagaaatttctgccgaggacacctaccagaagctgatcgatacgatttttgatgaaatgcacagctattataaggaacacacctccggacagaacttccagtatgtggatacgcctctagtcgaagccatccgctatgggtatattcttgagatacaggagcctacggtcattgctaatcccggtgtactggttggacttaactcccttttagaccgctgtaacagcgtatatcttccaaacggagaaaccatccaccgtcatccggatacgaccatcgtaatcaccacaaacaatgactatgcaggctgtaaacagatgaaccagtctgtcatttcccgaatgaaccttgtgattgatctggatgaaccggatgaggatacacaggtagaacgtgccatggctgttaccggatgcaaggatgcaaaaacggtacgtctgatgacacgcattgtcaaatccatggctgtctactgccgggaaaatctcattacagatggctgctgtggcatgagggagctgatttcctgggtgcagtcctacatggtctgcggggatatccgggaagcggcccgttacacggtgcttgcctctgcctctgccgatgctgagaaccgtacggaagtggaagaaagctgtctggatactgtgcttgctgcgtaggacacgcctatgagaaaagcagcactcacagaagcccagatccgaaagcatctggcagataatctgtcttatctccggcaagccaaaacaccgaagttatcacaaaaggcagttgccagaatcttaaatcttcccccgaaaaccattatgaattatgaaaatgcaaactcctccccgatggcttatgccgtccttcgccttgctgtgtattacggctgcacgatggaggaactgctgacaaaaaatctaagaaaagaaaggaagaatatcacgtgaatcacagccaaagaaatttaaagaaactaatccgggcaaaagaggattccattgcggatgaggagttattcctctccgctgcctatcagaagtaccagacctcccttgccagagccgttaccggacgttaccggtatggactgcaggtactgctggactgggacatttccgaacaggcaggcgttgcatataccgacaattataaggtacatctcaacgcagcgaacccgatcacccagtctttccccacccgtttcttacgttcccagagcctgacagggctcaccgggcatgaagtggggcacttactctattctgatttcacagcccacgctgttcatctgaggagtctggaaaacggttccttctatccgaaggagccggagctatcccttccagcttatcagacagcactggaggagatcaaagaagtgttagaagaaaaggacaaagccggatgcctgacactggcacgatgcgccgcaacttttcaaaacattctggaagacatccatattgaagaccgtatgtgtgaggaattccacggcaccttccgacaggggattgaactcaataacctgcgtatgtccgaacagattccttccatacaggaacaaattgacaaagaataccagccattttccatcattgccaacctgatcctttcctattgccggaccggaaacatcaacaatcccaccggctatcagggggattatctggataccatttccgattgtaccgatcttctggatacggcaatggaatcggaaaaaggcactgaccggatgctggtttccaatgcgctcttagccctgacctggaactatatccagccgctcatcgaaaaaacacgggaggaattggaaatgcatggcgaggattccgctgccgatgctctggaagatcttctaggggatgaagtcagcagcggcgctcctcttccgaccggaaaaagcggtgccattccaaagaatatcaaaccagcttccccaaaaggaagcgggaatgatgagggcaatgctccttccggtccacgtaccaaagaggatgctatagaggaagccaaacaggtgctttcggaagaaggcgggcgcatcgctcttacaaagaccaataccattctggatgaaaacaaccccggcgtcacttatgtcagtcagtatcagggcagcggctatgagcatgctgcagaggatctgttccggatcttgaacgatgtggctgcagaaaaggtgcaggaagactgtcagacggaactgaccgaggaactgcagaaaacagccaatgatattcattacggcaatgcccatgcaggcatccatgttaccatccatcgcctgaccagtgtttccgattacctgaagaatgaataccagacagttgctcccccgctcctgcgggcttccaaaaagctgcaaagcaccatcctgccgcttttgaaagaagaacagcaaggcggaaagcagaagaatctcctgtttggaaaacgtctggactcccatgctctctataagacagacggaaccatctttaccagaaccagacttccaggagaggaaaaacgtctggctgttgccctcctgattgacgagagtggttcgatgggttggggtgaccggatgacacatgcaagaaagactgccattgtcctttatgatttctgtaaaagcctcggtatccctatcaccatttacgggcattccacggatgcaggcggcgttgctctttactcctatgcagaatttgattctgtggacaatgaggactgttaccggctgatggatatgtgcgaccgcaacgggaaccgggacggcgcagctctccgcttcgtagcagagcatttgtgcacacgcccggagcttcagaagctgctgatcctgatttctgacggtcagccagccgattacggctacagcggaacggaagcagaggcagatctgcggggcatcaagaaagaatacgaaaaacgggatgtcatcctgtttgcggctgccattggtgacgataaggaaaatatccgcaggatttacaaggacggattcctggatatcacgaaactggaagagcttccaaagaatatggcacagcttgtcaaacagcatctcaaataaaggaaggtgaatactcatgaatgaaacttatcaaaaccggattaccgaccagatctgcaagatccagaatgaccgggcactcattgccttttatgaccggctccgctacgcaccactcggcaactatgcacagctacatgccaaaggggaatatcaggaaaacgggcataaagtacattctttaatctgcatcaccattcaggattattccaacggtaccggagaccggaatatcatcacccgtttcaacctggcaccggaacagatccagttcctcttaacccggatcacttccggttttcaggaatttgaatggagccagagcaagatctacggcaatcccgatcagaacggttattccacagcccagatgttttatatctccagacatccctatgattccaaagggcagcctatgaaaagcccatggaaaatccagattgtaaatgggaaaggcatcaaagcacagaataagaacggtggttcctacatgcagccacgcagcttccagtccgaaaagacgacagccatccagcttaccgacatggatctgttcacgcttctgaagcggacggattcctatatttccaactgggaaacggtgattgctgcatcactgatcaataacggaaaacggatgctggcagaccagcagaacagtcaaatgcaacagacagcacaggctccgccttacgctgcctaaattttcagaagagaagcggtactttactgcttctcctctttttaagaaaggagactttagttatgaatattgcactcatccggaccatggactctcaggggcgtatcgtcatccctgcagaaatccggaaacaaatgaagctctcagacggagatgcactggaactggaaaatgtgggaatggagctgcttttacgcaaatgccctacccacttaaacggaaaagaggaaatggcttcctatctttccgtcctctacagtgtcatccactgtggtatcgcaatttgcagtgaggctcacatactcgtatctgcgggcatctatcttccggaaggcactcccgttacagaagaactcgccgaattggttgcggacggccaggaactgatctctgctgagaactgccctgtctacccggtatccaacacccgtcaaccggtttgtgcttttttcccgattttaagggaagacagagagccgctggcacttcttctctgttccagaaccggacagcatttatccgagatggaattgggatgcgctaaactggtcgctgccgtaattgcaaacaaaattaagtaaggaaaggagcgtgaaatcaatgaagaatacaaatataaccttacacaccacccaaaagaaagaatatgtcctcaccggaatcctgtccctgcccctccatctgggagaacgggcgtggatctatagttataaccagacctttgctaccagtccggtgcagagtattctggaagtatccgaaaacggtgtggtatttgagacctgcaacagtatttaccgtctcagctacacccgtgttccgatggagctggaggcgatgtgtgcttgacaagaatggaagaactggagagctgcctttcggggctcctctccaccttaaagaagaaccgggaacatgtgcctctggaagtgctgaagacacagtataagcagccgtatgaagaactggtcagaaacatcaacctgaccgcttctgcctatgcaaaatctgtgctgctccaccggctggtcctgaatccggatgcagatgtggaggaacaatgtaccgtcatcaaccagatgatacaaacttccgggatgctgaagaaaatcagctcctgcatgtccaaaacctatgatgtaggacagatatatcctctgatactggaactacgccatatggtcgaacaggcactctggccctatgtgaatcaggcaacttgtctggtcgcagatctggatgatatagaaaaagaaccgacaatttacaattttttgacacatgaagtttatgaaaatgatacctggattcaccgagaaatcgacctgcgctggaaactactggtacatcttactcccgaacaaagagaatccgtaccaccagccaatcatagtatgaatggaggaatttaccatgaaagaacaaccatctaatccttgcgagaaagtctcatttattttgacctatgaccagcttgaagctgcttataacatctaccgggaacaatttatttcctgcgacttcatccgccgctccatggaacgtctggaggaaagaatcggactctgcaaccttccatatgaaacgctgcgtgatgatccaagccttcttcatgaagcatacctgcagtttctccgactggaagactgcaatgtggcttataacgacacgctggagcaggtaattgatgcaatcgaacaatggcttgcctctggcaccttatcccctgtaaaccttacggtttccaaccagaatatgggtgaaacttttggaacggaggtggatgtgtaatggcaaatatctgctgtgatgatgtgatcttttatacagaaggaaatccggaaggactatatgacttgtgggaggacctggaaacctacatcattctgaaccagaatcctgatttatgctggattggcaatttattttcccacaagaaaatagattccaccggaatatctcttcgtggaaatgtcagctacatggaatggaatgatacgtatattctactttctttagagacagcatggactccactttatgaagcatatcaggcgatagccgctgcatatcatgttccctttgtgatgcaaagcatagaacctggagaacgaatttattataacacggatgaagcacacctatttttccctgaccgatattgtgtccgcttatatgaagaaagcctattgactccatgtggcttaataatcggagaaaagctggaagacggtgaaccatttgaaacggaaacagacgtattagaacgattcagagattgcggatatccagcagctacactaaaagagttggagctcatgttcgatgcggatgaacttattatttttgaatttacaaatccatatttggatctggagcagaaaaatgcttgtgcatgaaacttctcccctccacaccaaagacgattatcatcagatttaaaggaggaacaccatgactgatttggaactggatgtctgggatgcatggctcagggaacgtcaggaacatctggaagaaaccctgtccaatatctcaccatcggaagaaccctgcagatattacctgctaaccggatatattcagggaatgctagaagctcttaccatgcttacgactgttgaggatgggaaacgcttcaagatcaaactggagcaatttcgccagaatctgctcctctctggagattacgatgctaccggtaactataaacaggcagtgaagaaaactgctgtttaaatacttcgagccgcccaatcggacggctctttttatgcccgaaaacggtagcctacaccacgtatcgtttctatgtagtgcggttcttccggattttcttctattttctttctcagattcttgactaacccatagacacggttatccacttctgactccacatcctcataaatatgctggtaaatctgttcttttgtaaatacccgattgggggataaggccagataaaaaagcaggtcatattcatgtctggtaagttccacaaccttaccatctttgattacgctccgctgaagctggtctatttccaaaccttggaatgtcaacttttcagaatttgtaatctccataacttctaacgtactttcgcaggctagaactgatttaattttattcaggattccctcttcggaatcagaaatggtaagaatcatcactttcccataacatcacctgcttttcttagcatttagctttcactcctcattaacaatgtttatcgattggttacatagatatatgcatcttccaaagttacgtcacaagctatacatccactttctgacggcatattctcccctaacagtcttaatctaattccttcctccgtatactgcttactggaaatatgatattttctttctaattctcttgcaaggctttcgtcctctgtacagcattcccatacatgccctcttgccttattcaataattccctcattgttcctgtataaaggaatctaccttttttcataaccgcaagctgattacaggttgccatcagatcctccaccacatgcgttgaaaataatacggtgcgttcttctgcaaaatctaccagtaaattacggatacggatgcgttcctccggatcgagccctgttgttggttcatccacaattaaaaaatccggctcatggagtaatgcctgcactaatccaactcttcgcttcattccacctgaaagctgccgcattttctttttctgatggtctgcaagactggtcttctccagatagtaatcaatccttttcttgctttctcttttctcaattccagccagatctcccatatactccagacattctcgaacagtcaaagacggatacagatcaatttcctgtggcagatacccaatctttttctgtatcttttcgtaatttgcttcgcaatatagcgtaccatctaacagaacttttccacttgtgggtgcaagcaccgttgtaagcacccgcatcaacgttgtttttcctgcaccattttcacctaacagaccaaatatcccatcaaatatgaatttgcggaggaaaagatactgtgaaaattacaatagaggaactgcaagaatacttattcgaccattataaaaatggtgggattgaccaaagcctgtttatgaaactcgtagaagaaataggtgaagtggcagaagtactaaataaaaaggcaggtagaaaatctgttggtcaagaggatttacaaacccaattaggtaacgaattagccgatgtggtacactacactattgcgattgctgcattaaatggaattgatatgaatgatattatactctctaaggataaggatgcatccataaagtataatcacagaataaatttagagcagtttgtaatggaacgcagaacgaaagataacgactaacagttccagttgttcaggatgaatgacagagcaaaaaaatatgaatttgaagaggtagtgattatgaaaagattgatagcaatggttctttgtcttttatttgttatatctttagctggttgtggaaaaggaaatacaaaaaatttagttattgattatgggacatcatctatatacacaaaagatgacatggatgaagctattgatgttataaagaaacaatttagttcttttgaggggtgtgaattgcacagcctatcttatacatctgatgatgcgtgcaataatgaggataatattgcctggatgaatgaattggaggaagcaaatgacaataaagagagtttcacacaatgtatttcgtttgatagtagtttcaggtcacctaaaaatggaggtggagcgtggaacgctaatgaagaatacacatggtcatggtggttggcgcgtagcgaaggcggaacgtggaaattaatgacttggggatattaacggtcggttcctaagtaacaaataacagtttgtctaagaaaaaaagataccaaccattctcaaaaatgcttagtatcttttttcttttgttctgtcattgtcctatgctgaaagcttttccaccaattccggcaggcacttctcaaataattcccgatatcttcgatacccttcatcccggagtggaccttgcagtgatgtcagagaccaaaggagaagctcttcctcttccacagcatacggagaggtatagacaaattttttcccgtcaaaatgcggttttgataacttcagtatttccgtaatctctccttttgtttccgcctgcataatcatttccactttcttccgatggaactcgcagacgatgctctccagaaatccctgcttcagataaaattccgcccttctataaagttttacaagagcctccactctttcatcaaataacttgtccttttcactgactatcatctgtgccagtgcgtttgcatgttccataaccaatgctgttcccattacatttcctcccataataaaagctggcataagaaatttcttctcacaccagcacgattcttttattcctctgtgatgatctcactgcttaattttccatgtaccagatagcgataattccgtctggaattgacacaggtagacagcgtaactatccgatccgttgccgacagctcggtgccggtatcataatccctataagaagacaccgtatccagaaacgtctgaaaatcttccgcttccgggaaatgatacctatatccctcacttccggttcttcccgcatagcaggaaaagatacgatacttgaggatcttgtccggcaaatagagataaaactccggatgttgttcaaatagctctttgtcttggtacttatccagagttccgaacatgctcccgtttttcatattatgcccgtacacgatcgtattctgatccgtaaagtccggctgattatggcagtccacaaagatgctcccgttgatattggattctcccgaaaaaaggtgatgaagataatatgcattatctttcccctgtaccaccggataactaatatccagtgccggaatctgaatccacgctatgacatccggattaaccgcttttaaacctgcaaaatcaatttctagatacctattcttaggttcctccttttctttctcagactccggtgattcttcttcctctggttcctgaacatattcctgcagtttctcgtaacttacgtcccctttctgatacttcagataagcaccaaagagttttcctgccgctgcgagaaaaacaagcaacaggcagataatgagtcctgcaagaaccgtatttcctttttttctcatgattgttctcctttcggaagagccgaagtctgtgccccggttccttccttctgtttgatggcggctaaatagtcatcaatccccttgtgtttcccgttccactccccgctctcgtccatatcccagaccatccggttcatcggcagggaaagctcccggcagatttcatagaccttattgcagccgttctggataatcctccgtttctccgccttatgctggcagataacaggggaacgctcaaaacagaccgcacacttactgtcatgcttattgcaggctactttcatcttcttatccatgtcatacgcctccaaaagctgtttcatcccatatcctttcatccgctccagcaccggtttcagattccggtactggttcactccggcaacgcacacaaaggtagcgccggacagataatgggctatggtcccttttaaggctccttcggtcagatagacacgttctgcggcaagatcaccgatcacatgtaccggacttccggaggaaactccctggtcataattgacactggacagccagatatattttttcgtgtcagtcacatgatctacccggatctgaaaaccctggatgaacccgtccaaagaaactatgggaatcaggattcctgagttttctgctttgaagttaatcgtccagtttccgtctgtatcccggtagaatcccggcacgcctttcaccatatatccttcttctgccagccttttgaccagcttcttcattccaaacagcgggacactccggtaacgctgtgcttcgatctgttccggttttaatcctcgtctttgcagatcctcctgatgcttcctgttaagcgtgagcatggacagcattctctgatacgtccggtggatttcctctatgggtgcaagctctgccgttgccttttcttcctgtaccggcgttgctttgatataatccgtccggtattctccttttcctaatgcttcccggatctgctgatttgcttcggagagtgtaacattgtgcaaatccgcataaagcttcagcatccccccggacgcatcacagcggttgcaccggaatacattcttttccacattgatattcagttttccatgcgtctctccacaaaacgggcagtcataatagtttccccgccgctttctgagatgcagcacctgcaccacatccagtattccataatcaaacccagacatatcataatacatcccggtctcttcctcctttcccccgcagaaaaaagctctctgcggggttcttccttaaccagccatcggcattgctttttgtaaaattacctttgctgccgccggaaccagattgttcggtccggaatattgctcggcaaaccactggatcgttgacgggctttcaactgccacctgtcccatggtctttccgccgtattttccctttcccggaatcacagtcccgactgccatttcatagttcatgtgtttcatcagttcttctaccggaagggacgtatccagattctgtaatgctccctgcagcatctgtccggtctttggcggcgtagaggcagccggagcggaaccgtagccaggcatttgtccactgccatggtaaatggtgcttcccgccgcctgtgcctgctgatagaactgattcatcatctgctggcctgcatattccggctgacctggcatctctccataagttggcataggggcatttggcatgacacccgaatccggcatggctgcattttccatggcacctgaatccggcatctgtggattctgatatggaattccggcatctacctgtgcaggatcattttcctctcccacatccgcaaactgcacaccatatccggcatccgataatgcccttcctacggctgctgtttctgccatttccagaaatttgtctccaaacttcgggtcatcgctccggaatttctgcgaaaaggaattggctacataattgtcttcctgatcacatttatccagatagatacgtgcttccacaactgccatgttctctgtgaaagtgataatccggctgatgatctttcctgccggattgaccagacgaaaccatagcttccggtatttcacatccagataaagctgctcctcctgcccttcttctccaatctttcttgccagttccatcggatggaagccatccacacggttcaaagcggcaactgcctctgatttcttatacaataattctttcattctctgctcctttcatttagaaaagcagacgttcccctatataagagtaatagtccgcttatttcaaaaattgaaaaatatttttaaacaacaagttttaactgctccatttccggtttctgttcactctgatactgatcgtaatactgtacgatccgctcactcagaatggtgttccttgtcccgctgtcatccgtatggattgcctgacagactgcagcccattcccctaccagataaaccttgcttttcgctctggtcactccggtatagagaatattgcgcttcagcatcatataaaaggcttttacccaagggatgatgacaaccggacattcggaaccctgtgccttatggatggttgttgcgttagcatgttcgatcatttccatctggtcagcttcatattgcacctgccgcccatccgggaatccgatcactgccctggcatttccatcctcatccgtgatacagtccagtatcctgcccagatcgccgttactcgccatctcggtatttttattctgtaaaatcttatcgccaacccggaacacctgactgccgatatgcagttccttcttccctgcgattggcggatttacaaaatcctccagagatttgttcaattcatccactccggcagcactgcgtttccgatacggagtcaggatctgtacctgatccatgccgttttttgcaatctcgtccagataaatcctccggacaatctctgccgcttcatctgctcctttacaggcaatgaactgaaaatcctccccaaagctcagattagtcttattctcctgcatcagttttgcattataaggtatgctgctcaaagcgccctgccggtaaaccagatccagtaccgtgaccggaatcagcccgcaggcaatcagttgccggaacacatccccggctcctacggatggaagctggttcttatccccgactaaaaggactctggcatgtctgctaacccgccggaaaaattcataggcaagatgcatgtccaccatggacacctcatctacatttagaaatccggcagacaggtactcaaaatccggttcaaaatccgtatcatctcccaaaagccccagggccagatgcatcgtggatgcattttcacagccggtactctccaccatacgtcttgccgcacgtccggtcggagccataagctgtacctctgacctgcataacgcctgatggatatagagaatcaccttgagaaccgttgtctttccggttccgggacctccggtaataatactgatgggatgtgcaaacaccatccgcactgcctgtttctgtgtttctgacagcgtgatccccagtgtcttctgtgccttttccagccccggttcaatggacagcaaaaccggcttctccaaaagccgtctggctatcatggaagcggtctgtgtttcttcttcatactgccggatagaatagatccgttcttcctccacaacaatgcttttttgcagcaccagccggtaaagcacctgactgacatcctgctccgatactgccatgacctgcagatcccggttcagcatttccagtgcttccctgataacctcctgacgctgcttaaacagatgtccttctttcattgcctgattcatgatatgtccgatgcacccggatatccgcatgggatcattgagtgcacagcagcactgtcttccgatcgcatccacagtcagaaacccgaagcctttgactgcactcagcatgtaagggcggtgccggataatatccaccgattcatttccgaatttcttcagaatcatattcacttttttgggtgttaccttaaaaggcgccagaaacgtcatcagttcccggaacacctggttttttccataggactccacaatagcagccagcttcttctcggaaattccacggatcttcaagagttcctgcgggttgttttccatgatttccagtgtctgaagcccaaacttccggaaaatagtatctgccatcttgggaccgatacctttgattgcaccggaagaaaggtatcctaagataccctcctttgtccgtggtacaacctccatgaaattttccacctgatactgagttccatgctctccgctctcccatctgccttccatctcaagctcaatctcgtctgtaagcggaagaccgaatccaatcactgagaagccgatgatattccgggatgccagatatttgtctctggctgacagggggacagacgtatcctgtgtggtgaatatggcaatcgtatacccattctcctcattctggaaaatcttatgtttaaatctgcacctcattgtttatatccctccagctttttatccgcatccgttcatttggttttctcattacgccgcctccttcttaattcggaaagtacggctctccgttgtttttgtatattcctcatagatatccggatgctggtttttcagcttctccatctggtctttcccaaccgaagtacgtctggtcggattataggtaatacggtaacggttcgtaccgtcctccagcactgccttgcagccctgccccagctgttccacaaaaggaacactgattgcccgctgttctgcttcgatttcctttttccgtttttccaactgtgacttttcctccgaaagggtaagatacttctcaagattttttgattccagaccggaaagcacaatttccggaatagatttgtctgcaaaaccaccataattacggatatttgccagaaccagatcggaattcccgttatgcggcggtactacatttttcaatacatgttcctgccagaaatacgtttcctgatcaatgatgtcttcttcctcaatcagatcacgctcaatggtgcgatacacaaactcattctcgttatttccatacaggcatgcgataaaggctttctgcatattcatcacagacagataatgccttacctgcagcacataatgagctggaataccctcatcagcccacttatctttcgcattataattgcaagttttacattccagaatcgcaaatgtcccatccggcatacgaacaaaaaaatccacatctgcaagcatgaacggatataatggatgccggaacatgacacgtaccggaaatacttccagtccggtctttttggaaaagatttctgccaccagatcttccagccggtgtccgacttccttggcaacccagttgctttcctcttcctcctgaatgaccggctgcacacctgttttgttgtaaaacagatcccggatagtggcaaatggagagatccccatgattgccgctacatcactgccgccgattccttttttgcggtattccaaccagtcttctcttgacaggttactgatatccacaaccttttccggtgtatactctgctttgttattcattccaattcctcctaacatttgactgctccataaacgtcatattttttccagtcttttataagcgccttcgtaatatcctcctccagcttcaggatgccctgtccggacattccttcacaggctgcaaaaaaggaggcttcattcatggcataataaagatcatgtgccgtacaggcaccttccccgttctgggatacaaatagctccaccacctcattccggatcttctgtttaatgccaagttccttcatcagcagcttcaggcagttcaccggattacggatctcaatgtccataagctgagtaagattcttcatcgcatccacatagcgggcgcatacctgctccagatttttccggaagtccagaatcgttgcccctttatcgtgagccagcttgattggacttcccagactgataacgccgtttggtccgtctgtcaaaagcatcggatacagatttgcaccgctcgctgccacgtcagatgtggtaaaacgaagtgccggtgacaggatcttctcatccattccgtgtgcatccagtgcttttcggtaagtatccagaagttcctgacttcctccgagcttccacatggcagatacaatggaatggtcatagataccagagccctccatgtaaacactgcctttgaaattcagattcagatattcgcaggttgtctcaaacatggctttcatatcaaggatgcaataatcatgtttatccccgccatgtactgcggaaacctttccgtccgcaatcttaatcagggcatccccttttgcaacccgcaggcagtaattgactaccttcgcatatgttgccttatccagcttgcgaagcccgtctccattgacacctgcgcggcttaaaatggtgcggatggcacagtcacgtaccggataggattctcctctcattttcagtacaagctgcgtattcttctctgtatcctccaaaatttcttccatggatgcatctgccgcatccagattttgagcctccttttccagtggtgccagccgtaacgtattcgttggctttctgatccatttggcatttcttcctctctctgccagaaactccagcagatcttttacttctgcaaaggatctctcaaatccatctgcatacactcttgcttcattcatgttcttattccacctttcttaaaataatatttatccatcaacagccgaagctggttgtggcatgcaactatgccgaaacctaaatgtaagcacaaaaaaagaatgaaaagagagtcttttctctgttcattcttaaaagtctggtttcttcctgaaaaaacaaaagtgccacgcagccaaaaaaggcataccgtgacactcactacaaacataaactacttatgccaggaatcagctcctgctgtttcctgtaagtttggagattcttatgaatcccgaaactccccaaaaagggtgtgcataaaataaactatatcagtatactagcacaagatattcctcatgtcaattcaggcttatactatatatggtgtttatatttgttcaaaatactacatctatttttctactacgaattcaatcttctctttcagatactcccggcagccaaaccgaaccgttccacactgctttgactcctctttcgccttttcattacagcagtccaagtagggacaatcgttacattgattccgcagtgcttccttcgcccattcaatttcctgctcatttcctataatccgcacagacatccacttcctttgctatcatcataccccaaaatccattttctatcatccataatttctttttttgtatcattttagtaaattacggttatattacggaataatcactatatttcaaatatatctctattttattccgtaatttgctgtaagtaaatagtttaaaatgtggaagagaggtgtaaatgtatggataaaaactttattggagaacgcatcagcgaactgcgtttaaagaaaaatgtatctgaatatcagatgagtctggatcttggcaaaaataaaagctacatccagtccctcacttccggacgttctctgcctaccatgcagagctttctggatatctgtgactatctggaagtcactcctcaacagttcttcgattcagagctgcacaatcttcctctgattgacaaagcaactgatctgatgaaacaactcgatgacgaggatatgcttgcgctcatttccatgctgaatcgtctggctctaaaacgcaaatagatttccgtagctgccaaatcaaggcagcttttatttttatcattttttctcaaaatttttcaatcttaaagaaaagtcccctattccttaattgaatgggtaatatatccattcgccgtaccttgaaaacaaaagaaatctttcgggagattgatataggtgactgcagatagtttgcatcttcgcacgcctgcagcttaatagttacaaagtaacaccgttttacgtggccggaacgggcataggaactggcttctgaaagaataacatagacttttgggattttagcttatagcgcttttattagagaacttttactcaaaatttgatataataatagacaggtatcaagttgattccctgtctgtggaaaggagattcatgataactgtaacaaaaagggatttgattgaattaggctacggtccttcctttgctgctgatattataaaaaaagcaaaggaacttatggtagaaaaggggcatacctattatcaatccagaaaattagacagggttccaaaagaagccgttgaagaattattagggattactttgcccgataagcaagaatgatcgtgctttttgcattttagtaaggagtgaaatcatggcaaaagatccaattaaaaaagcagaaaacggcacttattattttcgagccaatctcggatatcatcctgtaaccggaaaacagattcaaaaataccgcagcggattctcaaccaaaaaagaagcccgtgccgagtattccaaattgattcttgcatcaacggaagaattagctgataagaaggaagacattaccttcaaaaagtttattgaagaaatctatcttccgtggtacaaaactcaggtgaaagaaagtacctacaagaatcgttactcgaccattcaaaaacactttgcctatttctacaagaagaaagtgtccgaaatagaagcgataaatgtacagacctggcagctcaagttggcaaaacaattcagtccaaactatgtacgcattgttcagggaatgttatgtttagcttttgaccgggcgattatcctcggacttgcaaagaagaatcctgcccgcatgatcggcaatatcaaatctaaaaaagtaaagatcgacttctggactttggaggagtttcagaaggtaatatccctgctgtacaaaggtgactactacgagcactatctcttcatctcgttctggcttttatttatgactggaatgcgtattggagaggctgccgccttacagtgggatgatattgattttgaaacaggtatgctgattattagtaaaacactgtactataaaacaatgaatgactacaaattcgttgaacctaagacgcaggcaagcaaccgtaccatttatattgatgctgataccatcaaggaattacaagaatggaaggcggttcaggcaaaggttttaccaaattgtggattcgtcctgagttataacagtacacccaccagcaaaacaacacttccaagagcattggagaaattggcaaatttagctggtgttcacagaatcaaaattcatgccctgagacattcgcatgcttccctgcttatcagcatgggcgaaaatccactgctgattaaagagcgtcttggacatgaaaaaatacagacgacactaggaacttatggtcatctgtatccaaacaccaatattgagattgcaaagaagctgaccggggttctcagctaccagtcagcttctcaaagtattgctaattataccagtaatcagcatactgcaatgtatcacaaagaaatataaaaatgcaatgataatgcaatttcaaacacccaaagccgcaaagccccgtggttacgggctttgtagcccagcgtcaactattcaaactcaaaaatgccagccatgcatccagtttatctgtgatacctttattgtgcatattctcacgaaagatgtcaagcggaagaaatacatatttctgaagcagattaagttccaatcctgtatctgatctctgttgaaaaatatggcagtatctatctttatatttatgaaaatctcctgtacttttatcaatcagtacaattgtatatacactttttatatccttataggaaaaattctcttttctggtacttcgggcatttttatattgccttaataatagatcagaagaataacatgcgcatctttccccaggaaaagcgtaacctattttttgcacttccacgttacaatatgaaccatcatcaaatcgtaccagaatatccatgatcaaaagagactgctcatctgccagtcttgtagaatctcctggtaaaacttcgataattttcacctttctctgaagcaatacttcaagaaaatcctctaatctttccggtactgtttccggattcataatttccttaaaaaatgcatcatacagcattttcacccccttcactcccgtacagaaatccagaaattcctctcgctgttcttctttccagctataaaatctctctgtcagatttatgttctgctgaatgtcccgcaaaatctcctcgcgggttcttatcattggaaaataagcctttaatttcgtattcaattaatcttctccttgtctgataaaaatggaactttcgtttcagatctgaaacatctgtgaatgccatacggctagaataagtcttataagatacttatagaatatcatatttttatcttacatccaagatttttccttcctgttgtttctctgtatttcgacacaatattttatggcaatcaaccagatacggcgcagactacaaatatccttctgcaaaaaaactccctcacatatcagttttttctgatacatgagggagtttctgatttatgactgatctatgatctattttgctttataacggtaaacggtttttactgctgtgctgtctttaccggttgtccaatcactttcggaggttgtggtctgagtctggagttttttgttctggtactggctcatgcggtaccaggcctggcctctggctccgtggcttccgtatgcgccgttacaggtagttccgctggagcaccatacccggctgccgttcccgttccagttcagcagataataggtaatgctcgagtcatctccatctgcgccggaagcaactacggttacctgactggctgctacactgtcaaaatgtacataagagcccgtctgcgcaaagtttacattctgtccggtattcggtccgcagaaatgatagtaataatagcccaccagctgtctggaagcagatgtctccagtggtcttacagactcataaacaccaccatcattgacatagctggaggttgttttctgataggtgtgtttatactggatcgtatatttatcggaagtgatattcttgggaagcgtatccacataaacccagtttttaggtttcgccttgatcttaaaagtctttgttacggttccgctgtaattccccttaaacttcaccgttaccttataagtaccaacattttttcttccacgggaatatgacaccttataattgccggaactgatggttttattattcgcaccagttacttttaccttcggtgtttttacttttccgtcgtatgtatagcttgttgcagaaagctttattgtcttcggataatagattgttttctttccggtcaccgcaccgcaggagcaaagatactggacatatccgttcctggatgtagttgctttcttcacctgttttttgtagctgtgtttatgagcttttccggtaatcttaaaggtttttgtaacggttcccgagtaattgcctttaaaccgaactgttacccggtaagttccaacatattttcttccggcagaataggtaactgtatagttgtctgcactgatcaccctgttgttgctgtctgtaacctttaccgttggcttttttacttttccattataagtatagcttgttctggaaagctgtatttttttcggataatagataatctgtttattctgtatacttccgcagctgcactgctcctgtgtatatccgttggcagtggtggttgcctttactgttactctctgatagctatgtgtatgtgtgaccggagctgcctggacagtgaaattcacagaatccgaaaatgtatatgcatactgtgcatgattcacagatgccaccgctactctgtaattccccgccggcagtgtgcaggaccagtttgttccattcactccatactgaacttgcgtcggattggattctcctgctttatacacatatacatcataatatctggcatagcttgttgcattccaggaaaacgttgtggtctgattcgcttttcccggattcacgctcacatatggcttgcccggtacacgaacgcccggatagataaagccaagcagcaccttgttggaatcataagggcgccttcctccgactgcattggtcagtgtatatccatatgcaactccatgagaggaggtctgatctttgtccgttcttcctccctcatctaccgtaaatctgttgtttccaagattagctgttacataagcaacatgtccgtaataatctccgctccatacagcaatagaaccgggaacaggctcatttcctactgcatagccctgattgatagcattttgccaccagcttaccgcatttccccatgcaggcaatgcgattccctgtctgtcatacacgcactgccatgcaaagcgtgtgcaggggatctcgtataagccatctcgatccacatcctgtgttgtaggataaggattacctgctgctgttaccgttgctgccggtaccgcactgaaggcagttactgcggacagcgcaaggaccattaattttttcagaagcttctttttcatagttttctcctttcctgcggtttcatccttcttaccggataatcctgatctggcacgcctccatggctttcagtgcattctcatgactctccggtgttacacctgcgcagcatgtggcatcaacacagatcggcacttccggaagggatgccttgatcagcagagcattggagatcacacagatatctgtgcaaagtcccacaagagtaatacttccgattccttcatcttcatcgatcatagtcaattccccggcaagatcggtggagccgaaggtttctttatcaatgggttctgttttccttaaggcgtccagctcttcccggatctgccatccagctgtgccccggatacagtgaggaaccggaaggtttttcccttcctgtgtctccagataatacgtttcatgggtatcccttgtaaaaaatacctttccttcaaaattccggatcttctcctccaccttcggaacaatggcagctgcctccttcgtgccaagtgcaccgtcgatgaaatcattttgcatgtctactacaatgagaatgttctgcatgtttgtcaccccttgtttcataatttatttctgtccggcaaatttatgatacctttattgtgcatactctcacggaagatgtcaaggtaaagagatccagtcaagtggatattcgcatcggtaatttttttcggccacttactgcaaaatcagcctttcctcccagctatccagcgaagcactgatagctcatccaactaccgagcagccacactaccctaccgccctgaaaaaccagcccgtgaggcgtgtgctgcctgtcgccggactctgcaggaggggagctgattcttggctggcggaaatctgcgttgttttacaaaggtccgctgtctgagcggctgcaagacgcgagttcggacttttgtaaaacgcttttagcagattcccggcagcctagaagccagcccccgacgaagccccggcggcaggcagcacacgcctcacgggcgtcccttttcacaaaaaaaagccgaaccagccacatcccgcagccagttcagctcaacccatacaactacaaactcactcaccatcaacccaggcaagcaacttcccagtaaaaactctattaaagaaatgaatcaccggccccaaaccaaaagccgtcaccagcgtaccaattcccacaacaccaccagtcagataacagatcagtgcacaaagcacatcattagacatcctgtgccagaaataaggaatcctcggccacttctccgtcatgatcaaagaaagactatcataaggcgcaaccccctcatccggcatctgatacatcgacaaccccagacagcagatcacaaccccaatacacagcgcaaccaatctcaccggcagcgccacaagctccaatcccataactccatgaaaaatattataaaaaaacgtaataatataagccaggcacaccgcatttacaactgtaccaatccccagaaacttccttccaaaagcaatctcaataatcaacagcacaatattcacaatcagctgaaaattaccataagccataccaagcgtatctgcaaccgccatattcataccactgaacggatctgttccaagcccggccagcttgaaaattccaatccccatacctgcaaaaacatttccgatacacatgatcagaacatgcttccagttaatgttcttcaaatactcccccataaaccttctaccttatcctctctgaaaatattgtcaggcagatatccacgatccaccttcactgcgcaggatccataccggataataccttaataaccagcctgctgcaacgcttatattctatcacaccacctcacccctgtaaaacacaaaaaccccaagaaacaacaaaaagcaacaaaaaaagacatccagcagaccacattatatgatccgccggacatctctctttttcatatcacgctgttaattcaatctcacaatcaccagtcaatcctgaatctctcatggcagagcttcgtcatttcagatatcccgaaaaatttttccaatatcaatattatttaataaacttaacctcaggataaattgcctgcttggcagcctctttacgctcattaaatacaaccttgttctcctcaaacaggttacgtccctgtgcatcgatagatacaatcagcggaccaaactccttaaccttattgcaccataaagtctcaggcataccaagctcatcccagtgatgctcaacaatcttctcaacctctgtagcagccacaactgcacatccagccgggaaaacacagtggatagcaccgaactctttacaagcacgctccgtattcgggcccataccacctttaccaacgatcactctgacaccagtcagttttgtaaactcatactcgaacttctccatacgcatggaagttgtcggtcctacagaaaccatctcgtaatcatcctctgtaccctcgatcttacgaacgatcgggccggcatggaaaatcgctttgttgcggatatcatacggaagctctcttccatactcaaccagacgacggtgagcaacgtcacggcaggtcatcagatctccgtccagccatacaatatcgccgattttgatatcagccaggtcttctgcgcttataggtgtaataagaacttttttatctcctctgatttcgatcatgatttttccctccgtttatattaagcattaaatttccatgtggaatgagtatcacaggttactgtaagatccggatttacaaccagatgtccacgacggtgagaccagcatccaacgtttactgcaacaccgatggtagatggatgacgcgcggtattctcaatgttaacacccattacagaatactttccgcccataccctgcggtccaaggccgatcgcattgataccgtcctcaagaagcttctccatttttgccgcgtttgcgttgtcattgtgagaaccgatcggacgcatcagcgctttcttggagttcagggcagctgtctctacagatgtacctacaccaacaccaacaagaagtggaggacacgcattcagtccataagttgtcatctgatccagaacgaaatctgtaacaccctcataaccggcacctggcatcagaaccattgcttttccaggaagggtacatccgccgcctgccatgtatgcgtagatctcacatttatcgctgttcggaacaatatcccaccatacagtcggagttcctttaccaacgtttttctttgtgttgtactcatcaaaagtctcaacggaattatgtcttaacggtgctgcaaaagtagcctgaacaacagcatctttcagaagtgcttccagctcattgatatacgggaaatttgttccgcatttcagccagaactgaagaacacctgtatcctgacagcttggacggttcagctctacagcaagaccctggttctttgtcattgtctcatagagaacttttggaagtgcagctgtttcctgggaaccaagctcttccagtttcttaactacgtcatccggtaatttttttccaatatgggcaacaaaatctgctaccatgtctgttaatactttaactccattttccttagtcatgatttacctcctgatatggttcgatggtttaatgttttttagttacataggtttttgttggttgtttcatcattaattttggctgattaatggttaagatggcttttttggcttatttatcatttctccttcactgtatggtcagtgcagaagggaatgaacttaattaaaagtgttgctgtcacaaagtgaacagtaactcaaaagtttctctccttacggatagaacggaaacaggatcggcaacagaatcatacagatcacaaaggataccaggatcagcggcagaccggatttcacatagtccttgaatttgtatcctccaagaccgactaccatggtgtttgccggcataccgatcggtgttgcatatgcacaggaacctgttgcgataacaacggctctcggatctgctccgaggttgtttgcaagagataccgcaattggaatcatcagtgctgtggttgctgtatttgacataaagtttgtcagcacacaggttacaataaaaatcaccagaagaagaaggatcggactcggatctgctccaagaagtcctacgatcttatctgcgatcagttctccggctccggttgtatccaatgcttttgcaagtgtcagagaaccgccgaaaagaaatacaaccttcaggtcaatggacttcagtgcgtctttctcggaaataactcctgtcagaaccaggaggatcgctccgatacatgcggaaacctcaatgctgatgccgatctctttctcaaagatcattgcaaggatcacaaggatcagtactaccagggaaacagtctgtttccacttcggtacatggctgaaatcctgctgatcttcaagagctgcaccggatgcattctttccatccggaaggaatttatatccgataaggacaaagtaaaggattccgatcagaagcatcggaactccaaccggcgcatacataaagaagcttgtggaaagccccatctcctgaagtgcattcacacccatcaggtttccgggtgcaccgataatagaaaggtttccgccaagtgctgcggcaaataccagcggcatcagaagacggcttctggaataaccggactcatcggcgattccacaaactaccggaatcagcactgctgcagtacctgtattggataagaatccagacattacacctacgatcaccataatcgcaatgatcagtgttttttctgttctggcaaatttcgtgaccagtcctccgatcttatttgccattcctgtttcgaacaatgcctggcccactacaaacatgccaacgcaaaggattacgttactgtttacatactgtgaaaatgttgttgttgcatccacaactcctgtgagtgtcagaccgatggcacagattgaagcagtcagtccaagaggaattttttcaaggatgaaactaataatggtgaacacaagaaacagcaatgttatagttgtctgagacatttctgtactctccttccatttggttttttcctgaaaagtataggccgtacacgtttcttttgatgattttattatagcttgtgtacatacaaaaaaacaaattaatgaaacatatatccgcataaaaaatatttatagtatcagtttttaatgataatttttgtgcactactaacacaaaagcagcatcttaacaaatgaatctggcaaaaattatatttctatgctatttttatgtagacaccaaaatactctgtcacatcttttccggacggaaatgaaaaactttactaaaaaatttaatctgacaatacatcgagagaaggtttatcatgacactgaatcaactacgctatttctgcacagccagccgctgccacagcatcacaaaggcagccgaagaattatatgtgacccagcccaccatttccatggctatccgcgatctggagattgaattcgggatcagtcttttttccagaaaaggaaatcagctgagtctgacccaggagggagagtccttctacaaaaaagctacctatatccttcaatattgtaatgagcttcaggccgattactccagcatatccaggataaaaccgcctcttcgcatcgggatccctcccatgctgagtaccgtattttttccggagctgcttacggcgtttcacgaaaagcacccggaaattgccgtagtactggaagaatacggatctgtccgtgcctgcaatctggtacaggatgacaccctggatgtagctttggtcaatatggaacagtataatatagataaatttcacaacactgtcctggccaacgaccaggtggttttctgtgtgagcaacgaccacaggctggcagaaaaaaaatcagtcacaacaaaagatatggcaaaagagcagctgatctttttcaatgctgactccgtccagaatcagatcctgaaaatgcgttttgagatggatggccacacacccaatatcgttatgcggagcagccagatctacaccaccctacaatttgtaaaaaccggaaaatatggctgctttctctactccagcatgaccgataacttttccacttccaatgttaccggtatcccgctcaatccacctgtccgcataaaaatcggcatggtatggaaaaaaagcaaatatatcagcggcgatatgctgacatttctgcatttcacccgcatgtattacaaagaacatccgctgatagaaaagtaaatccccaaaactcccaattatatgccgattaatttttctaataaatgcaattttttttaaaaaaccattgaaatccatcaattcatgtgatactctgtgttacagtgtttttctacacaaaacgaatgaccgccaccaccgtacacaaaaaaagggtcctggcatcattcaaaaataaaaaaactcaggagagtctcttcaaatcaaaatggaagagcgccgaaggtgtacgcagcacacaaaatgctgtaaatctctcaggcaaaaggatggaggaaagagtaatgtttacacaaatcaacaactttatcacatggtttgacggagtcgtttggggacttccgctgatcattctgatcctgttcacaggaattctgttaaccactcggttaggtcttttacaggtaaggcacctcggaaaggcactgaaattcatggtaaaaaatgaagaaggcggcgatggtgaggtcacaagcttcggagctctgtgtactgcgctttcagcaaccatcggaaccggaaatatcgtaggtgtcgcaactgctatcgcagccggcggaccaggagcacttttctggatgatcgtagccgcattcttcggaatggcaaccaaatacgcagaaggacttctggcgatcaagtaccgtaccattgacaaagaaggccacgttctcggcggacctttctactacatcgaaaacggtatgggaaaacagtggagatggcttgccaagatcttcgcatttttcggagcaggtgtgggacttttcggtatcggaacctttacacaggtaaacggtatctcatctgcagttaccaatttctttgacccggataaagcacacacagtagcacttttcggaaatacatattcctgggcaactgtagttgcatgtctgatacttaccgtatgtgtaggacttgtcgttctcggcggaatccagagaatcgcaaaggtatcccaggtcgttgtaccgtttatggcagttctctatgttgcactggcactgatcatcgtgatcacaaacatcactgcagtacctgcagcgatcgtaactatcgtaaaatctgctttcacaggaagtgcacttgcaggtggcgcaatgggaaccatggtcgtagctatgcagaagggtatcgcccgcggtatcttctccaatgagtccggtcttggtagtgccccgatcgcagccgctgcagctcagacaaaggagccggtacgtcagggtcttgtatccatgacaggtacattcattgatactatcgttatctgtacaatgacaggtctttccatcgtcattacagaaacatggaacacaggtcttgagggtgttgccatcacaacagcagctttccagaaaggacttcctttcccgccggttgtcgcatccttctcactgatgctgtgtctggtattcttcgcattcacaaccattctcggatgggattattacggtgaaagatgtctggaatacctgttcaacagaaacaaagccgcagttacaacataccgctggctgtacatcatctgcgtattcatcggaccatatatgactgtagcagcagtatggaacatcgcagatatcttcaatgccctgatggcattcccgaacctgattgctcttcttgccctgagcggtgtggtcgtaaaggaaactaaggatttcttcaaaagacataaaaattacgaattctgatcccaaatatcgtaatcaaatgtaaacacacgcaaacccatgatgatcccctaatatcatataaaaaaagacgcgaacctttttatcctccgataaaaggccgcgtcttttttatttaaaagctttctatgccagcgtcaggatctccatctgctgtgtcagatccgctgcatccagaatctctccatttcggatatctttcttatcaagccggacacacatttcctctccatctgtcatatggaaaaaattatcctccagagtaacatccgcatcagtaaatccaatagctgtaaacgggctgaagcagctgctttttaaatggatcacaaatgcatcaccttgctcctccacctcggcagtgatctccggtttatccagttccagatatttatacggaacaagggtctccacatcacagagcacatctccgtcagcaagtgtcacttccgcctcaagaaagatctcatacttcttgtcttcccatccggaaacatccaccgccaggatcggagcggactcctgcacacccacagtgcccgttccggtaagcttctcaagaatctcgcattccatatttttcacataaaagacaacctgatatgactgtgcgtccatactttcatttgccagatacacctgcatgatatccccatccatgcacatactcaccgcctgtggcccatagaatttttttgccatataatgaagtgccttccaacggccaaagtagtcgatacttgcccaggatgccaccggccagttgtcattgatctgccagtaaagggtacccatacagcggcctctgtgacgtctccagtggtctactccatacttcatggccattccttgaaggatctggctcacatagagaagcttgcggaaattctccggataacggaaattctcggaaagataatacaggatctttccgttagctgcaggatttttctggtggttctccatcaccctggaaaaaatattcctgtctttctcttccgtaaagctctccacagttttcaggcacggaaaagactggaagccaaactccgagcagaaacgaaaataatgcttctgataatctgtaaaaggcttctgaccatgccatacatcccagtagtgacagtctcctctgttctcatcgtccggatcatcaaagcaacctccggagcttggggaagactgccagaaaaaggtctcgctgtctgccgccctcactgctttcggaactatgtactcaaacatttttatgtagtccgcacggagatatttcgactcactctgtacctccggccagtgatcccaggcagactccatctcattgtttccgcaccacaggccaagggatgcatgatgacggagacgttttacattttccgtgatctccttcgtgatattttcttcaaattcttctgtaagatcataaacattacatgcgaacatcagatcctgccatacgatcagtcccatctcatcacaaagatcatagaaatgatccgaaggataataaccgccgccccacacacggacacagttaaaattggcacgtttgcaggattccagaagatacttctggacctccggtgtgatcctggaatagatgcagtcctccggaatataattcccccccatggcaaaaattttcacgccattgacacagaacgcgaactcttttccccagagatctttttcctggctgatggtaagggtacggagaccgatgcgcttcgttatggtttccagaactgtgccatcctcgtccagaagttccacctgaactttatataacggctgattgccgtagccgtttggccaccagagcttcgggttgtggatcgaagatgtcagcactgctggattattattcgctgatacagtctcccccactttgcatacatgggcttccgtttttcggtcgttagcacctgttctatgtccacaaacgctctctgcatcctcctggatcgtcaccctcaactgacacttatccacggcatctccgcttacagccacagttatacacacatccacagcattatccccatgcacctgtgtgatcttcacatcctcaattctcggatgactgtatgcttccagataaatatcccgaaaaatcccggcatcaatggtctgggggccccagtcccatccaaacatacaatgagccttccggatcagctggtttcctttcattccaccgcagggaacatagtggatctctttattatcttcatactcataagcttcgatatacttgaataccgaccggaatacgatccggatctgattctccccggaatgaagaaattctttcacatccagcttccaggtacgatgcatgttatctgcagatccggctttttgcccattgatataaatatctgcaagagtatccagcccctcacagaccagtattattttttcttctttcaggatatcctctgcagccacaaatgttctgctgaattcataatccttccggaacagttcccttgtcacatcctcatttgtccggtaaaaaggatcttcgatcttcccggcaccatagagcccggaaagcacagatcccggaacctgtacctcacataatctgtcatttcctgcttctgccagctcccactggccatttaacattattttcctcataaaatatatcttctcctgtaaaaatccccttcgcacgatcttatatacagggctgttgtattagccgtactgtattttatttatagccttcccccataattccggtaattctcaatataatccaggatctcctccgggtctttcatgaaccggcacatacccacaacatctctggacataaatttttcccctgctgtgtattccaggagtgcctgcatgctgtcgtaatatccctgaatattataaagaacgatcggcctgtcgatccgtcccagactcttcaatgtcagaatctcaaaaaactcctcataagtaccaattcccccaggtaccacgatagtcgcatccgagcggctttccagcaggtgcttcctctcacgcatattttcagtaaaaatgaactctgtacaatgctcatacaacactcccggctggtcaaaaaatctcggtgcgatacctaggatataacctttttctctgtcaacaccccgggctgccgcccccatcagcccctcttttccacctccgaaaacaaggccgtggccacgtttccccatcagctgtcccagctcttccgttttctcataatagatctttttcagctctgcgctggacgctccatagatacaaatattcatgcttccgtctccttccctgctgcctccacaaatgcccggagaagcttcagctgttctgaagaatcatacatcatctccggatgccactgcacagctactgcaaatggatgatcatttatctctgaatataacttttgccggcctctgcacatgatactggcaaagaccggctttccgtcatttccgatacatctggaatgcatccggaaatgcctgttattttattataatctgacatacacatggggtcaagcaattgccgctgcctgaagctcccgttttattatacgagaactttttctactgcgtttttccatccgctgtatttctggtttctttcctgcggattcatggaggggatgaactgattgcggttcttcacctcgaaaatgctctccatctataatttaggactgatcagtcatacaagccattctgctcaaaatctctgaacaggctggcttctccatcatcagcaaatgcatctgcatccccctgatcggaatcatcctgtcctccctggatatctgggatatctgcatcctgggaatcctgggacgtgctatcctcagagctgtccttgctatccttgctggaactgtcatctttaccaagttttacagtgagtgtcttctccttatactcattgccatccagaactgcaaccgtcacatcgatcttttccttcggctcataatactgaagcagctcaaccagctgatcgatactggtgatcgttttaccatcaaactctgtaatgaccatattcttggtaatacctgcatcatcggcagggccgccctcggttaccttcgaaacaaatacaccctgcgggataccataaatctgtactgcctccgtacttactgtactgcctgtgataccaaggataccatgattatccactttatctcttgccttggcattcatcatgttctcaagagaatccgcaacatcagaaattgcaatggcataccccataccttcaacctcagtagaagcaagcttggaagagttaataccaacaacctcaccatccatattcagaagcgcaccgccactgttaccgggattgatagccgcatctgtctggatcaggttcacgcccttgttgatactgctgctgttatctgtagaatcaccctcgatctgtcctgatgcatctgtcttacggttcttagcactgacaataccagtagtaacggactggccatagccaagtgcattaccgatggcaacaacctgctcaccgatcttcagatcatcagagcttccgatctttgcaacagaaattgcatccattgtatcatccgaaacatccttcgttgcaacagaaacaactgcaagatcctcgctttcatcaaagccctttaccgtagcctcataagcattaccatctgcaaaggcaactgacaaggtatcggcaccatccacaacatgatagtttgtggcgatcagtagctcagaatctgtttttccgatgataataccggaaccgcttccttcaacttcctgctcctggctcggcgcatactgggaaccaaacatgctgtaataatcctgaacctcctgaacggacttggttgtgatggcaactacagaaggcattgccttctcagcaacatctgatacatccagactgccctttgtatcggaggattttgtagcctctgtatcttcgctgtctttatttgattttttatcagacttcataagagtcagattctcggagctatcggttgccgcctgtacggactgtgcaccggagaaataatttataccttcatatgcaccaactccaatgccgccggcaagtactgcacacaggctgatggttgcaccctttttcatcattttctttatttttaattttctgttgttgttcatggttaagtcctccctgggaaaaaattcttctctgtttccttttgatgcttcaaagtatatgggttaattgtgtttactttgtgggaaaaatgtgttttatttgttaaaacttttcactgtcatcacaactacaaaccacgcaacctcaagaagaacgatcattccacctggtttcagtccggcataataggaaagaaacagtccggcaatggtggtacataccgccacgataatggcacagatcagtgtacccttatagctttttgccatctgcatcccacacgccaccggaactaccagcatggaggaaacgatcagggttcctactgttcgggacgcaatggaaactgtcagagccgtcagaatagtaaaaagaaaattaatattccgcacggaaacaccggagatccttgccgcattttcatcaaatccgatataaaacagttccctgtaaaaaaacagcactgctgccagtaccagcacactgatcacaactaccagcgccagctctccttcactgatggacacaatacttccgaacaaaaagctgttcagactggcaccgttttccacaaagccggacagcacaccggccagtccgatcccggcagacatgacgatggagatcgccacctccgaataacgcgggatttttttgcggatagcctcaattccaagagcagctacgatgcacatcactactgcaccggctaccggattcactccaagtatcagtcccagcacaacaccggccagtgaagaatgggaaagcgcatctccgatcatggacatccgtttcagaacaatggtgatcccgatgcagggcgtgatcacagccagaaggattcccaccagaaaagccctctgcataaatccatactgtaaaatactcatacttcgtcgatcctcccctcttccgctttaaagaaccggtttgcgcctttaaactcaccggaatttccatgagtaaccataaggatcgtcagcccctgttcctcattccgcttcctcagaacttctgcaagtgttttcacagaaaccatatccattcctgtggtaggctcatccaggatcaggatcttcggttttcctgccagtgcacgtgccagcataaccctctgctgctgtcctccggaaagatctccgatccttcttttccagaactcttccatttccatttccgcaagtgcggctttcaaacgcgggatctctttttttgcccggaaacgtgccttccaggaagaggaatacacacctgtcatcatgatctcttccacagtcgccggaaaattctggtttctgctgatactgttctgtggaacatatcccagatctccctttccgaatgtggcagaaatatcttttccatttacagtgatacttccctcctgcgccttcagttcgcccagaagaagcttcagaaatgtactttttccacttccgttttcaccggtaaggatggcataatcgccatccttcacctccaggttcacctgatccagcacaggtgtccctgtatagtgaaacgaaagattttctatcaaaattcccataatttctccttttttgttacagctactgtcctgcaccttcagttcaatgccttcctgagtgcctccagattcttcctcatcacagaaaaataatcctctccggcctcgatatcctcctcacttaatccctcgatcggattcaacacagcagtcaccgcatccacttccttcgccactgtcttcgccaccttgggacttgccagctcctcaaaaaatatggtatggatgtcgtattttttcgcatactcgatcacttcctgcatcttggcaggatcaggctctgaatccggtgtcagcccttcgatagccagctgcttcagatcataggcattgcatagatatccaaaagcctcatgcgccactatgatatcccggctcttcgtacctttcagaccatctctgaactcctgatccagctcatcaaattcaccggcatatttctcataatttgcttcataataatcaccgttcccaggatcagcctttaccaaagcatccctgatattcttcatttcctgctttgcacgcataggatcaagccagacatgaggatcttttccttcatcaccatgagcatgatcatgtcctccatccagaagctccacaccatccgatgcctcagacacaaccagatcctgattctccagagtatccagtacatcctccgcccagtgctccagatccgcaccattatagacaaacacatctgcatcttcaagattccggatatccattgccgccggctcccagtcatgaggctccgttcccgccggaaccatatccttcacctggatcctgtcgccccctaccttccgggcaaaatcatacatgggataaaagctggccatcaccttcagtcggccatcctccacaaatggctgtcccaccgttccggccctgtgcaaaccatatccggtcacaccgcccacaacaagaagcgtcaccgccagaactgctgccgctgtcatcttccctctgttaacattcattttttaagcctcctgcagctgtcacaatatccataaaagatcgtccggctctgatcgatctcaaatccgtgttcatccagcacatgtcccacaaaatgatcgatacatccacactgcagaggaatcgtatgcccacattccagacacacaagcttaccgtaattcttccgctcctcatcacgtataaaacgatactgggcaggcgctccctccacagacggaaccttcagcaccgctccctccttctgcagccgctccagtcctctgtataccgttgtccttccgatctggatctcttttccacgaaggagctccataaactgatctatggtataaaatgtatctccatattcctgcaggcattccagaattattttctgctgcctggtgctgtatttcattttttcttccattatatttcctactctcttctatcaactgcaccttacatggcagatttgaatttgaaaaccgttttcatattacattcaaataagaatttcgtcaagatatttttgaagggaaataatttttggtatgttcttataaaagcactttatctctaccttcttttatgataaaatataaccaagacttaaccaatagaaagaaggtagacctctatgaaatcacagcgactggacatgatcgaagaatatgtgctggagcataagaacgcttctctcgatacattatgtgagaaattcaacgtatccaaaaacaccatcagaagagatgtcgatatccttctgaaacgtggcagtatcatgaaagtatatggcggtgtcgcagcactcgaaactccacagactcttccccttctgtcttacgaagagcgtggcggacgttttcctgacgaaaagaaagaaatctgccgccgtgccgcagagcttgtggcagaagacgataccatctatatcgatacaggtacaacctgcctgaacctggttgattttattgcagataagcactgtacgatcctgaccaacagcctgcttatcttcaacaaggcagcatcctatccgaacctggatatcatttccgttcccggaaagctgaaccgcaagaccctgtccttcacaggaccggatatcaatgattatctgcagacctacaacatttccatggcttttatggcctgcacaggtgtaaccatgaagagcggacttaccaatgccagcgcagaggaatacatcaccaaaaaagccatcgcagagaatgccaacagcatgatccttcttgcagaccattccaaattcggccggatctcgcttatgacctattcttccatggaaaagctggacgccatcgtaaccgaccagccacttcctgaagaatacgacagcttctgccaggagcacggcatccgtgttatgacgatcgattaaatcggatattgaccctaaaaaacggtgcatctgccggaaatccagcagatgcaccgtttttgaatatgctcatttcattagaggattttatctgaaaggcagatcttacccgatctgcctttcagtgtcataaatttatttatgaagctttcttaagcctcagtacttccttcccatgtgccgacctttctctttccggcagcttcatcgaaccagtgtgttgtaactgtttttgctcttgtgaagaaacgatagccgtcttttccgagaacgtgcagatcaccgaagaaggaatccttgtttccggagaatgggaagtatgctgtcggaaccgggatacctacattgattcctaccataccgccatctgtctccatagcgaatttacggctgtaatatccgctctgtgtaaagatacaagaaccatttgcaaatggattggcattcatgactgcgatgccttcctcgtaatcctttactcgtttgatacaggttaccggtccgaagatctcacggtttccaactgtcatctcaggtgttacatgatcaagaattgtcggtcctacgaagaatccgttctcatatccctgaactactacattacgtccgtcaagtacaagctccgcaccctcatcgatacccttctggatccagttgcagatcttctccttatgacctgcatttacaaccgggccgagatcggtatcttcatcatatgcacagccaagcttcatagcctctgcttttttcttaagaagtgaaacaaattcgtctgcgatactatcctgtacgcatacaaccggaagagccatacatctcatacctgcgcatccgtatgtagagttgatgatcgcattaacagtagcctcaaggttgcagtcctcaagtacaagtgcatggttctttgcctcacactgtgcctgaactcgtttgccatgagctgctgccttggaatatacctgtttaccaacacctgttgttcctacgaatgtaacagcctttactctctcatctgtaagaaggatatcagcctctacacggctgcaggtcacaaggtttacaacacccttcgggaatccgccctctgtatagaagagctccatgatcctcatagctgtaagtggtgtctgggagcttgctttcagtactactgtatttccacatgcaatggaaagcggaaccatccagccccatgggatcattgccgggaagttcatcggaacaataccagcagttactccaagtggtttgcgatatgtagctgtatcatatcctgtagttacctgcattgcagcatcgccctggatcattgtcggaagtgcacatgcctcttctgtaggctcaattgctttctgaacatctcctcttgcctctttgatgttctttccgagctcttttgcacaaagtacggaaagctcttccttatgagcataaagaacatctctccatctgaacatatactgctgtctctttgcaagagaaagtgaggaccattccgggaatgcagcctgtgcggaagcgatcgcctcttctacctcatccggtgtacagcagggaacctgcgcgatcacctcacctgtactggaatctgtaacatccatgtatttctctgcctttgactctttccactcaccgtttacacagtaacccatttttttgatctcggccattttaagacactcctttcgtgcttacctttttattcttaacttcataaaaattttagtcattctcgttttgttctggtcacagattatcatttatttttaattttgtcaatatagtatggttatattttgagtatatttttcaaaattatgtgttaatttattcacatttcatgatattccatgttccctgtataaactcttgaaacgcatgcatttacagccataaaactgcatcgtgtcttgtcgttttttattccattgtgagagcaaaagttactcatttttgttattttcataacacaccattccacacacactatttattgcttccagctacgctgaggcttttagacctgtgcaatcggattcacagacaagtaaggggtatcgttgttctgttacaattacagattcctctgctcccggcatatttcctctgtattttccaggaacaagaaaatacatctgttcgtaccttgcggacacgctcattttcatgaccgctcgcttcttttcacggcttattgcacctttacatacaatcctgcgcctgcttatctgatctacagcattttcataaattactgcagcaatcaaaaaaacaggatacggttatcgtatcctgccttagcttttcattttctgtttttcacatatttctgactaaccaaatatggtctgcaccagctccatataaaacaccgttccccctcctatgctgagcaatgtactcttcttccatttatgtaataccacaatgaacagtattgcgatcagctccggcagtccgtaatgcgtactttccgtcacatccttcagacaaaataccaccagcaatccgatcactgcacagggcaacacttttcccagataggtgatcacagccggcggttcctttcctcccgggaatatgataaacggcaaaaatcgcgttgtcatagtccccaggaccactaccacaaccgttatgatctgctgtgttattgtcatagtcattccttatccctcctgtccggctatatcccaactgtcatgcctgatattctcctgacttctgtatacgttctttttttctcttctcctcatgcttcttcattcccaggaagcataaaacgatcgatgccattgacggaaggataaacttcccgcttccaaagatcaccaggcagatcacagagcatacaattccgaccagcgccggcttatgatcttgtgcatcttcccactgatcaacaaacataaccacaaacagtgcggtcatgacaaaatcaatcccctttgtattaaaatggatcacataccccaaaagtgcacctgaggtagcacctgccacccagtaaaactgattcagcgcattgacaaaaaacataaaccatccacgatccacgccttccggtggctctaccgtgcagttcacggtaaatgactcatcacacattccaaaaataagataaaactttttccatccggtatttttatatttctccagcatggaaagcccatagaataaatgtctcgcatttaccatcagtgtcaggaaaaatgcatacaccggatcaaaggctgacagcagcagattcgctgtaacaaactccatagagcccgcataaatgaaaaagctcatacataacggatatacaaaagaaaatcctttactgcgcatcataaatccataggacatccccagaaaaagaaatcctacacagataggcaaggtatacggaaacgctgctttaaatgcttttttcttcaatgatgtacgtcccttctgttttacaatttccacagctgatgctgcccgtccatggtaacaaaatctccctcattgatatctctttcataaaggagaccgtcatcatgtcgcagacttgtttcatttccattctcatcttccaccagcactactgacataagtgcttcgcccggctgccgctcttcacagccgaaatccatgtcttcttctatcttcagaaccttgtactgcatgatcagatttcctcaagcagcacatcgttaacggcctcataagcgtcctcgagcgcatccagtgcctctgtcagcgtgtccatcttccggctgtccgcattttcttcctcataggcttctatcacttcagccattacatccttcagctcttccagtgaatttgcaatgtcctgcagcttctgatctttgtcctcttttgatgtgatatttacgatcttactcatgatccttcctcctgtcactttactctcattctttattctgatcctttatcctgcatatatcatgctttgcatgtcatactccacatttacccattgtaccatatcctgcgcgcagatgcatcggatatgttttctatctgctttatataataccaccgaattcataaaaaatttggtaaaatcttaccaaattacccgtcttagtctgtttatactgatttttccactccggtctggtataatcgatctaaaggagtttttcaatttacaaaccactcctttcccattacaaggaggcatattgccatgaaagaaaaaaccgaaacctttaaccagggaaaaagatatttcttttatattctgatgttcgccatccttggctggttcatttttatgcagatctttggtgcggatgaacgttcttccgacacctcagcagcctctgtgatctattccggtaccgttacctggcagaaaccggatggaaccacccaggaaatctccgttccgggcacctacaaggttcccgtcggtgacacgatggtcctcaccatccagcttcccgatgatcttacagatacctgctttgccatccgttcttccttgcaggatgtggatttttatgtaggggacaacctcaggaccagctactccacgcataaaacaaggcttgtgggcaaaaactccgccagccgttatgttttctgcccggtttatgcttccgatgccggcaaagagctccgtattgaactgaccacctacacctccaattacaccggagttgtcaatcctgtttactgcggaaacaaggcagatatctggatatatattttcagcagatacggactggaaacctacattgctttttttatcctgtttgccggaatcgtcacgatcctgttcagtttcgctctgggattggtctatcatacacgatttgacacggaatatcttggatggtgcatggttatgggcgccgtctggatgctgggtgaatccaagctccgtcagttcctggtccccaacgcttccgctctcggatctctgtgctttgttatgatccttttgtgtccgctcccgatcctgttttttgcggacagtctccagaaagggctgcatcacagattttatgtctgtcttggaagcatcgcaatgataaactttgcagtctgtacgatcctcactgctgcaggtatcgcagattatatcgaaaccatgcctgtaagccacggaatcctggcgatcaccgttgccacaatatttgtacaccttttccaatatatacgcaccgaaaaaaacaaggccgaccggcttttgctcattggtctgctggcagcgatcctgtgtattgccgttgaagcaacctccgtatactttgtcacattgatgtccggactgtttgtgggcgccggcatgctgatcctgctctttgtcaatattgtaagagccatcaaaaatgtccaggatatagaactgaaacgccagcaaagcgaaatccgcaaaaaccaggaacagaatgaaaaaatgtctctgcagatgatacagaccctttccaccaccattgaggcaaaggatgcgtacacccgcggtcattcctaccgggttgcacaatatgcggccctgatcgcagaggagctgggctggacaccggaggagatcctgaatctgaaacgggctactcaccttcacgacatcggaaagatcggtatcccggatccgttcctgaacaaaccggcacagctgaccgatgatgaatacaaccttataaaaaaacacaccgtcatcggcgccgagatcctaaaggatataaccctgatcccgcatgcggcagaaatcgcaagaagtcaccatgagcgttatgacggaaaaggctatccggacgggctggccggaacagaaatccccatccatgcccggatcgtggctgttgccgactgctacgatgccatgaactcccgccgaatctaccgtaatgcgcttccaccggaggttgtttacgaagaattccgcaaaaaccgtggtacacagttcgacccggagatcacagacatttttctgaaactgttaaaggaaaagcagctgcctcagtgggatccttcccaggaagaaccggacacctataaccttccggatatgcagcttaccgtcagcaaattcatctcggacataatggccaccataaaaagtcaggaagacgcaaaaagctatgatttccttaccggtcttcccatgcgtaacctgggcgaacgtcttaccgcggaatttatgcagacacatgatggatgtctggtattccttgatatggacaacctgaaaaagatcaacgacatctatggccacaaagccggcgaccgtgcactgaaatgtcttggaaagctgctccagaaacgggcagatcagggaatttcctgcagacttggcggagatgaattcctgatgttccttccggacacagatcctgattccctgtctctgcagatggacgatctgttccagaaatttcacaccatcactaccgatgatccggaactccgttttgccacactgtccgcaggcctgtgtctgtgcagcaccgatgattcctttgaggactgctattccaaagcagataaagctctgtattacgtaaaacaaaacggcaaaaaccagttctttttctaccagcagatcgaccgcagcactcttgcggcatccggttccggaaaggatctggagcttgtggcagagtcccttcagaaaagcggcatctatgtaggtgctcttgatctgaattaccgggatttcgcacgccagtatgaatacatgagtcagcttgtcacacgcagccagtgcagatgttatctggcgatgatcaccatcgagacacttgtggatacagttcctgatatcgaatccattgagcaggctctggagtatatggaacaggccattcggcagaatatccgccgtgtggatatctgtacacgctacagctccctgcagtatctcatcatactgtttgaacctgacgaaacgcatatcccggacatcatagaacgtatttttacccaatattaccgtcagtgtgacagcaatgatttccagccatcctatgaatacctggaaatatctccacaggagttataaatactcccatgacatgataaagccataacaaaaaagaggtcgtacttgacggcctcttttttgttaaagttttgcaaaatatcattaagacgtggctctggaattttcctgcatgaaactttttccgtatgttcgatacagataaaccgccatgaaaatagtcacggcttctgccagcggcatcgtcatccagatgcctgcaacccctataagctttggcaggatcaatatgaacacagccaccaggatcaaagaacgcattgatgagatcaatgccgaaataaaaccatttcccagggcagtaaaatatccggaaagaaatacatttaaaccaataaccaggaaaaccggactaaacagcttcaggccatcccatgtcaatgtaaatacatttccctccccaacgaataaatggatgatctgttttccaaatacaagtgataccgtgaggatcaatactgaactgatggcaatcgtaataaaactatatcgtgttatttctctgatcttgtcatgattttcagagccgtaattatagcttatgatcggagccgctgcaacggcaattcccatataaaaagcgatgaaaaaatagtaaatatacataatgatcgtcacagccgcaactccatcttcaccaaaatattgcatgataataagattaaataaaaatgtagtgatcccggtagacatctccgtcagcatttcactgcttccattggtgcaggatttcagaagaacactcatgtcggtcttcggtctgcaaaaccttatatggctgtatttcagaaaatagataaagccgatcaacatgcttactgtaatggagagaaatgttccccatgcagctccaagcgttcccagtctgaatacagccacaaaaatatagtcgaaaacaatattaaaagccagacctgtcagagacatgatcattccgatgtacgatctcccatccgtcctcacaagatattcaaaaaatagcttgaatgacatcgaaactgatcctaaaaatatgacaaatgcgtatggcaccacatgctccatcaggcgctcactgcttcctaaaaaaatacagatcggtttcagaaaaaggattcccacagctgtaaaagcaactgaaagtacgaacagcacgatcgtgataaaagtaaatatctcatttgcttcctgttctcttttttgtcccatccgctctcctatgatggcacctgatcccgttgcaagcatgacagatgttccgaaaataacacaggtgatcggaataacaatattaattcctgcaagcgcgtcagagcctgcataccgtgatacaaaaaatccatctatcgttgtataaaatgataaaaagatcatggtcagcactgatggaaccagatattttaaaaattgaggataagacatttttgcctcaaagtatttcatttctataaaaacctcctgcttagttacataatcagtcaaaatctctggtaatgttcgtaagccatttatttctgaaatagtggatgaacaccacaggcattttttcgaactcatccagggtcattataaaatatacccagacaggcggcagttttaaaacatatgctgcaaggaaggtgagaggaactgcaacaagccacataaatatggaatctacgatcattccgaacctggaatcgccacctcctctgaagcatccgcatataagacaggtattgataccctctcctacaagacgccaggttgtcatgattataaaaataccaagataataaatggctgtctctgtcagtttatcccggtagaagtccagtatcatagggcggactgccagaataatggcacatccgatgagacttacgataattgttattctcagcatacgttttccatattctctggctgtatccttgtgatctttaccaagctcctggctgataatgatggtagtagcgttggcaaaaccgcgacaggcgatggcaccaatgtttaccaccataacagcaacggcatttgcggcaaccatatcatcgccaatgtggccaaggatcgctgcgaacgccgaactggcaaagctccagacaacatcatttatcacagccggagaagcaattttcataaagtccctgaacagaataccggatttcgcacagaaatattttatccggaatctgacatcggagctgtttaatgaatagatgagacagatcaatacctctgcgatcctggcaataacagtaccaagggcaacaccggtaacaccaagctttggaagtccaaacaggccaaagataaaggtggcattacaaaatacattgacgcaaagcgatacaatgtatgtaacagaaggcagcattatttttccgacacttcgaagggcactcatgaaaacctgagagaatcccataaacataaaggaaaatgagatcaccttcaaatactcgctgccggcagcaatcgtatccggactgtttgtaaaaatcttcatgatcgtagtcggcatggaaaaggagataacgaaaaatacaagagaaacgatcagtgagatccgctccgccaggccgagaatcttttctactgtctttttatcaccctttccccagtactgggcacataaaaccgaagtacctgtagccataccataatacaaacagaaaagaataaatgtgtactggttggcaagagatgaagctgacatggcagtctggcttacatatcccagcattacagtatccgcaacatttactaatgttccgatcagattttggatcatgatcggaaatgctaattttgatgcatattttaaaaaatcttttttattcagcatcggtcagatcctccgtgaattccgataagatatttacttataaagaacagtatatcatataccctacaaaaccgcgaggttttttcagtattctttccaatataatcctcaattgtatactatatttcaccctctggtcatatttccattgtacataaaaaaacaatatcactttaacacaaaaaatcattctatttttttacttctatgatataatattttgttgtgaaactaataaaacgaggtgaaccaggtgaagaaaaaaacaattgtacctcttatcgtttttttactgggcatatgccttgttggtttaattgtatacaaaatagactcacatgaaactgaacaacgacacataacagcacaattaaatgcaacaacctacggcgaacgtataaaaaatgaaattacaaatggaattgcgatcacagatacgctaaagcaggtcctgatcagtgaaaacggaaagatcagtcagtttgacacaattgcggaaaatattatgtctgacgttattgaaagcatacagcttgctccggatggtaatgtaacagatatttatccttctgagggaacggaagcgagtaagatcgatctgctccaggataaagattgcagcaaaatttcctgttacgcaagagacaatcacgtgatcattacacaaggtcctttcgatttaaaacggggcggctgtggaattgctgtccgcaatccagtctacctgaaagatgaaaacaaccaggaatatttctggggatttaccattgttatcctgcgtgttcctgacattttttcagatgcgatcagtgcactttcggatttcggatatgaatacagactctcaaaaaccgacgctccttggagcgatacttataaagttgtttatcagtcagacgaccaattaactcctactgtttcttatggttttacgataggggaagaaaactggacattagaagtagctcctgaaagcggatggagagaccttagattactggtaatcgtcggcggaatgtttactgctgtcgttttacttttctcaggtcttatccgggtatggttagtatcgaaagaaaataaaaacaaatttcaaatactggcacacacagattctctcaccgatatttacaaccgctatggatttgatgaattagccgaaaggatgatcactaaaaatccaaaaacgcattttgtggccgcactccttgatattgatgactttaagtttattaatgatatttacggacatgtctatggagacagggcactaaagagtcttacagatagcatgaaggcttttttcccaaaaaacacattactgggaagaaacggtggcgatgagttctgcattcttctgccgaatcatacctataaagaagcgggagaactgctgctgcaatttaccaagcttccaaagacattttcatgcaagggaaaagaatatccgttttttatttctctcggatatgcagaatatccaacctttgcatccagccgttcacagcttatgcgctgtgcagatgcagcactttatgaaataaagcttcacggaaaaaacggatgtatggcttacagggaggggctccggtcaggagtccgcaaacagctcggatttgcattcaaggatatctctgaacaccttccgggtgcatttatcatatacagagcggacaaagatgatgatgaactcctgtatgcaaaccatgagttccttcaaatgaccggatataaaaatatagatgaactcttcagccttacaaggaaaagcttccacaacctgatcagggaagatgaacaacagcagatagaaacaagcatctggaaacagatcgatgccggcaataacaatgactatatccactttcatcttcgaaaagcagacggcacttacctttctgttcttgatcacggaaggattgtggacagccagcaatacggaagagtattttatgtattgtttatggactgggaagctatgcatgttcattacagtgataaattttccggctaaggtacagacatctcagtctgtatcttagccggctgtttttttcctgaacaattcaacatcttataatatgtattccatctgcctttcttttgtccgcattcccattttttcataaaatttttctgctgaagtatttcctgcccacacattcaatgtcacttcatagcatcccagctgctttgcttctttttttacatattcaaacaggctttccccaatatgctgtcctcgtgtctcctgatcgacacacaggtcatctataaaaagagatttaaacggtaccatattgtttgaaaaaggctgctcctttaattgacaaaatgcataccccacacaaacatcagcctcatccgctgcaacatatactggcttttcttcatttttcaaaagctctgtcaattcgtctgtcgtatattttgttgtgcccggaataaaaatatcaggccttatatctgcatggatctgcagcacctgtcctaacaattccaggatcctcggaatatctttttcttctgcttttctgatgaacatttttttcctcctgtttttcaataactgatttcatagattctttatacatacaccataataccatcatgtgaacgcttataacaatagaatcactttaagcagtctcgctttccttttgtattataatgaaaaagtttatcgttttccgtgatgtatatcacatttttattcctgaatccgtatcattacagacagtcagctcaaaatggtttctgtttgtttttataagcccttctttttgcagctttgatatctccgaagacattgccgcacggtcaatgcaaagataatctgccagctgctgccggtcaaaaggaatatcaaaggataacgatgcctgtctgatagataccgacgacagataggacagcagcttatcccttgtcgttcgcttgccaacatgtgtgatcttatcgttgaggatcaggatcttatttgccaggacaccgaccaggttacggatcagcttctgatgatgctcacatactattgggcaggaaaccagaagcctttgaacatttaataaaataatctcacaatcttcgtctgctaccacactgacattcagaacagctcccggacttgctgcatatggttcaccaaaaaaatctcccgcatgacattttgacagaatattccgatgtccccacaggtcttcctgaataacaagaacacagcctgccaccacaagtcccattacttcggtagagtctccggctctgaaaatataagaatcccgttttctggagatcgttgctgcatttacacaatgcagtatggataatatctcattatcagtaagacctttaaagaaagggctcgttcttagaatgggtaaatattttttcaaaattaatcctcctgttggaaatcaaacatacacgttgtaattattatactatactcctaacagaaaccaaggataaatactactggccgaggataaaataataagaaagatccttcggaaaaatcacagaataaaaggagaatacaataatggataaaaaaatgttttgttttcagtgtgaacagacagtcggatgtaccggctgtacaggaaatgccggtgtctgcggaaaaaaagcagatacagcgaaattacaggatgagctgacaggtgcattgatcagtctggctaaagctgccgacggcacggaaactatttcaaaaagaaccggacagatcataatcgaaggactgtttactacagttacaaatgtaagttttgacaatgcagcaatcgaaaatatgatacaaaaagtcagagctgaaaaagaaagactggctcctgactgcagaacaaaggaatatgatcttcagcagctgtggaatgccaatgaagatatccgctccttgaaatctcttattctctttggtatccgcggaatggctgcctatgcctatcatgcaaatgttctgaattatgaagatgccgaagtgaatcagttcttctgcgaggcattatctaagatcggttatgaagaaagcacagaagcactgctttccacagtactcaaaacaggagagatcaatctgaagtgcatggcacttcttgataaggcaaatacagaaacctatggaacaccagagccaactgatgttacacttacggtagaaaaagggccttttattgtcgtgaccggacatgatctgaaagatctgcagcttttgcttgaacagactgagggaaaaggaatcaatatctatacacatggtgaaatgctccctgcccatgcctatccattcttaaagaaatactctcacctgaaaggcaatttcggaactgcatggcagaatcagcagaaagagtttgaccatcttccggccccgatcctctacactaccaactgtctgatgcctccaaaaagcagctacgctgacagagtatttacaacagaagtggttgccttcccgggagctgtccatattgacgagaagaaagacttcacaccacttattgaaaaagcactggagctgggcggttacaaagaagatcgtatgttctccggtatcaacggcggaaaaaaagtaacaaccggttttggtcatgcagccatcctgtcccatgcaggtactgtagtagaggctgtaaaatcaggtgcgatccgccatttcttcctggttgccggctgtgatggtgccaaaccaggtcgaaactattatacggaatttgtaaagcagacaccttctgacagtatcgttctcaccctggcatgtggaaaattccgtttcaatgatctcgatctgggagagatcggtggtcttccacgactgatggatatgggtcagtgtaatgatgcttatggtgcgatccaggttgctgtggcacttgcagatgcatttggatgttctgtaaatgagcttccgctttccttcgtactctcctggtatgaacagaaagcagtctgtatcctgttaaccctcctgcatctgggtatcaaaaatatccgtcttggtccttctcttccggcgttcctttctcctaatattctgaactttctggttgaaaattatggtattgcacctatcaccacaccggaagaagatatcaaagcactgatgaaccagtaaaagtaaatttttcaaagcctttacaaaatcaacaaagccgatacaggattccaaaagtcctgcatcggctttatttacaggtctaaagactcggatcagccgacaacacttttaaacatgtgcagcgatattctgatggagttaaatgataacgttttttaaacaatctgcaaaaataatcaacgttatgaaatccgctttcataagcgatcgtttttacttttttattcgtatttttcaataaccaggaagctgcctgaagtcgatatcctatcagataattaaccggtgtagtatgtaaaaaacggtggaacaaattaagtgcagtacttttgctgattcctatatgcgaagcaatttcatccagagacaaattgcgattatagttttcatgtatatattgcatgatcaactgcactcttttctgtgcaacttcatccactgtctgtacatctcctttatcagataactttacattttcataaaaagtcagccataaatcctgcagcaatgccaaagtagcaagctcttttattttctcattcctctgtatttccattatttttatcatagtttgtatgatctttgtttgccatagttcatcaggctgaaaacgctggaaatatatattcgatgaaatgattggcaaaatatatttcttatagatcaggctgttctccggtgcaataaattccggcatacatacaaagttaggaatgataccacctgatgatgcgtaaaagcggtgcaatattttagaattaataaaaattgcttctccttctgacaatataatctgtttttctcctattccgcatgtaacttgtccggactcgacatataaaaactcaaattctctgtgccagtgccactcaatacaatgaaaatcaaacaattccagattatcataataatactggaacggataatcactgcttccatgctgtttaatttccatgaactcctcgtctgtaagtattttattataatccatcccatatcacgttctttcttttttacgatattatacagtatttctacaatttaattcaatgtatatatctgatatttgctatataatcaagcaaaaaaagaaaagaggtattcttatgatttttaaatggatgaatgaaagtgagatcaacattgagggcgacaaaattgaaataaccgcaccacccagaacagacttttttgtggaagtattgatgaatgtgaagattgaacataaaactgttaaaaacattcggagaggaaaataaaaaatgaatgctgtaaaaaaaactaactaccataagacaaaaatagcctgttatatgggatttatcacacaggctattgcggcaaacttcgcaccgcttctttttttgaaatttcacagtgactaccatatttctctcggtaacattgctctgatatccactttcttctttttcacacagcttctggttgatctgttctgtgccaaattcgtagatcatatcggatatcgtgtgtgcattgttgcatcagaaatctttgctgcattgggtctgcttggactggcatttttacctgattttttacctgatccttttattggaattatatgtagtgttattgtttatgccatcggaagcggtttaatagaagtactttgcagtcctattatcgaggcctgtccgtttgaaaacaaagaagcaactatgagtctgctccattcgttttactgttggggagctgttgggacaattttgatttccagcttatttttcctgatatttggaatagacagttggaagtggctcgccgtaatatgggcaatcattcctgcaattaatacttataacttcatgacctgtcccattgaatctctggttgacaatggttctggaatgggaattaaggatctgttttccaagccatttttctgggttgcaatatgtctgatgatctgttccggagcttctgaacttgcaatggctcaatgggcatctgcttatgcagaatcagcactgggattatcaaaagctctgggagatctaacaggtccatgtatgtttgcagtaacaatgggaatcagccgtataatttttggtaaatatggagagcagttagatttaatgaagtttatgagtggttcaggcatattatgcgttgtctgttatctgcttactgctttgtcatccaacccgatcatcggactgatcggttgtattgcatgtggattttcagttggaatcatgtggcctggaaccatcagtatttcctcaaaaacttttccaacaggtggaacggctatgttctctcttcttgccatggcaggagatttaggtggcagcattggacctggaattgttggtcgtatcactcagaatgctggaaataatattaagatcggcatgggattcggacttatttttccagtaattctattgtttatgttattcctgctgtatcggaagaaaatatcaaagcactgacttattgattgtaattatattttttcactctgcaaacccggaagctgtatcatcactttgttgccagatactatagacctgatacaacattgagcggaacctgaagatttctggtaaaattgtcatgatttccgcatgccagcatcttcatctgtacccgcattgcagaactcaaatttaatatcatcatgatcgcagtacgtgccacacgttctgtgctgtatgccaggatattacaaactgtaatccccttcttccgtgctgctatcagtcggccatgatctccgaagagccacataggatattaaaaagttcgcaaaccaaccagctggtacagcaagccagacaaatacaatgccaaaacgcggtgcacagatcaaagcaacagacaggcggatcgccaggttcaccatatttgcaatgaggaacgggcgcatgatcccaagaccacgaagaaccccatcggttgccattttgattcccataaagatgaagaagtaaccaatccatctcatatagccctcggatacctgataggccaaggcagttccatctttaccaaggaatagcgtggaaatctgcgtgtgcagtgtttcaatgactataaaagcaagaactgcaaaacatacatctaacaccagtgcagcgtgatatccttttttgatccgttcaattttctttgcaccaagattctgggaaacatatggggaaaccgcattgccaatagaaacaaaaatcaatgaaaaaacattctctacccgcatcgtcgccgcataccccgcaagtgcctgtgtaccgaagggatttacaactgcctgtacgatcatcataccgatggacactgtagactgctgaagaaccgaaggtacagcaatttgaagcatggaatgtaactcctgcctgtcaaaccagtcaaagcgacttttatatcgacgcatccggctaaggaaaagcaaaagtgaaaacaccgcagaaattccctgtgctataagagtcgcaagggctgcaccaaacacaccgagaccaagtccggccaccatccagagatccataaaaatatttaagattgacgaaaatatcaggagccccagcgggatttttgattcgcctatggaggtaaacatattggaaagaatgttatacataaacagaaaaggaaatcccacgaaatagacccgcagatataacactgcatcatccagtatatcgccaggggtttgtaacacactcatcatccagtgggaaaagcaaaatccaaaaaccccaaggactatacttagaattaaaaagctaaacaaggatgttgacacgatggtcttcatttttccatactccctggcaccgaaatagcggctcaccagcacaccggcaccgacacctgcccccagtgccacacaaatgaaaacattagtcagcgctgcacaggccccgacagctgcaagtgcggaggagccaacaaattggccgacgatgatagagtcagccatattgtatatttgctgaaaaaagctgcccaaaatcattggcattgcaaaaaccgtcagcgctttaagaggcgcatctgtgatcaaatactcatcttttgacattatcctattcctccacaggtttcataatttcacttattgctacactgcccggcgttatcagctgcagctgcaatacgatcttatcacgtattaaagatattaaaggattacggctatagaaatcagaccccaaagccgagacattctctcaatgaatttcccgaccgatccattccatgatcacatttacaacatattcctgctccgcttctgtcaattcccgtcctttcggaatacgatgccatttttccagacatcccctgcaacaggtagctgtggcatgctgggctacaaaaaccggatgccctctcatcggtgtctgctttccatcatttggtatttctgccggtgcaagacgctttctgataaaatcacaggcatgctcacgtactttctccattcccttttctgatacataactccgatcgtttgccttcagggaaaaactgcttctgaactttgactgcgacaggcgtttccagagattcccctcataaactgccggtgtctcacatgccatagaaggctggatgctgcccttatagacgatcttcttcttactgtcgcttccgttctcatttgcggtctcgtctactgcttctttcaaaagctgtgccttcacttcctgtgcttctttgctgttcggctgcagacgtcttgccagacatgtatttctgccagttgtcgtttcattttttatcgcataatacacagctttcttctctccgacaagtaccaggatctttttcgccctggtcacacctgtataaaggagatttctctgcagcatgacaaaatgactcatggtaaatggcatgacaacgattggatattcgcttccctgggatttgtggatcgtcactgcataggcaagcgccagttcgtccagctctgtcacatcatagactacttcccgttcatcaaacaaaactgtcagttcccgttcttccacgtcaacttttgtgatagtcccaatatctccgttaaatacttccttatcgtaatcattccggatctgcatcaccttatccttcagccggtactgtgtgccgcctctccgcagaaagatctttgatggattcatggcttcctgcagcacctggttcagatttactgccccacattcgcctctctgcatcggagtcagcacctgaatatcctgcagtggatctacatgatagtatctcggcaggttcgtcttacaatattggacgatagtatccaccacttcctgattactctctttggtggcaaagaaaaagtcggcatctttcccgcctctcatatcaatgccttcccctttattgatccggtgtgcattcatgatgatccgacttccctgtgcctgacggaaaatccgtgtcagacgaactaccggaacacatccggaatcaataatatctctgagaacattgcccgctccgacacttggcagctgatcaatgtcgcctaccagaatcagagacatctgctgcggcaatgcttttaaaagattatacatcagcataatatcgatcatggaacattcatccagtatcagcacatctccttccagcggatgttcttcatttttctgatagccttccggaggtttatattccaataaccggtgaatcgtttttgcttccattccagttgcttctgacattctctttgctgctcttccagtcggtgcagcaagaatgatctgacatccagcctgcttatatgcagaaataattcccagagttgttgtagtctttccggttccaggtccaccggtcagcaccatgaccttagaggaaaccgctgtctttaccgcctgccactgaatctcgtcataagtaatttctgatgaagctgctactttcttcaatatttcttccgtatcctcagatttcttctttccacaggacatcaaccgaagcagccgctttgcacagccactttctgaaaaataatatgggggcagatagattgcttcccgatcttctgcttcatctctgatcacatcattcgtgcggatcatctcatccaaggtgatctccagctccggttcttccacttccagaagttcctttgcccttccagtcagctgttctcttgttgtataacaatgacctgcttctgccagcttattcaatgtataaaaaataccactgcgcagacggacaaatttgcctttgtcaatccccatcttctgtgcaatggaatccgctgtcttaaatccaattccccagatgtcatctgcaagccggtatgggttctcctttacgattgcaatgctctcacttccatacgtcttgaaaatctttgtcgcatgagaggtgctgacctcatgactctgcagaaaaagcatgatattcttgatctctttctgctcctgccagcttgttttgatccggtctacacgtacttttcctatacctgatactttgagcagttcatctggtgtctcttcaataacatccagtgtatccttcccgaatttttccacaattctttttgcaaactttggaccaacgcccttcaccagaccggaaccaagatatttttcgattccatatactgtggcaggaagtgtctcttcaaatttctccaccaaaaactgccgcccatatttggcatccatcttccacataccttccagagacagcacagaaccaacatgggtatccggcatcgtgccaactactgtgacaagatcactgtaattcttcaccgcacatttcagaaccgtgtagccattgtcggcattctgatatgtaattctctcaactacacaacgtaagtgctccatgcccgtctccttctctcatgaaatttcttctccttttgtacattctgtgtttctaatgcgtgacttatattgcggatattcagtaataaaccgcttaattacattggcatcattccagtaatgcattggaaaaatgacattgcaatctacatttttaaggaaatacaggatcccgtcagcatagtgatctccctgtctcggatccaagggaacaaatgcagcgtcaaaatgcatacccttgattttcctgatcgccgcgcgatatgctgaagtaagtctctggttatcagctttcgacccaccatcccaataccagtcgtttaaatcaccggcatgataaatggtaccttcctttgttttgacaataaatgcgacaccactatcgttagatagcaatgtatcaactttggtttcattatccaaactataagcttgatcatgataaacatatgtgatcttcatatccgacaaatgattcctttttcgtatatcattcgccaggattgcctgataagtcattcccatatcatcaaggatcccaaaaatttgtgggttaaaatgatccttatggaagtgactgcaaaaaacgatcacttctttctccttgtcaagattcggtaattcacccttgtaataatcaaaaatatagtagcagtctctggtctcaaccaaaaatccactgtggttaatgtaagtaattttcataatatcacctatataaattaacgccggtaccggatagcaaatctttctttgccatgtttatttttcctttttcgagcgtttgtaaatttcacgacaacagcatttctaatgcagattttatcgtattttttagattccgtccatcctttatccacagctggtagaaaaatgtgaaatgatacttttacaaattctattacttgttgttagttcataatttatgtataatcctgtctttgacagtcctctttcacagtgttaatatcctgcaccagtgtccgtatttttcagaatcttaataagacggcttgttccaagacgctctgcgccaagactgataaatttttctgcatcatcgaaggatgaaattccacctgctgccttaacttttacattttttccaatatatttcttcatcagctctacatctgcaaaagttgctcccgctgtagaaaatccggtagaagttttgataaattctgctcctgcatttgtaacgatctcacacattttaattttctcttcttctgtaagaaggcatgtctcaatgatgactttgaggattcttccatcacaagcttcatggatcgcacgaatctcattctctacttcctcatattttccatcctttaaaaatccgatgttaataaccatatcgatttctgaagcaccatttgcaatggcgtctttcgtctcaaatacctttacagcagttgtattatatccgttcgggaaaccgatcactgtacaaatcggaagttttcccgctacatattccgctgcctgttttacgtaagcagccggaatacatgcagatgcagcctcatatttcatggcatcatccaggattcctcgaatatcatcccatgttgcagtctgtccaagtaatgtgtgatccactttttttaatatatcttttttatccattttacgttccttttacttcagttcatccagaagagaacttccaattgttccctccggcatcttaacttcaaaattatctgcaatcgttgcaccgattactgcaaaagtattctgatcttccagttttccgtatccctccatagatggggaataagcaaaaaatggtactttttctcttgtgtgatcagttcctgtatgcgtcggatcatttccgtggtcagctgtaatgatcagaaggtcatcctcacgaagctcatcaagaagttcaccaagttttacatcaaatctttcaagttcctctgcatatccctttacattgcgtcgatgtccccaaagagcatcgaaatctacaagatttacaaaacaaagcccctcaaactctcttttcgcaatgtcaattgtctgctccattccatgaacagagctttttgacttattggactctgtcagtccctcgccgtcaaaaatatcaaaaatctttccaacggagatcacatcataacctgcatccttcaatgcattaagcgcagtttttccgtaaggcttcagtgcataatcatggcggttgctggtacgtttgaactcaccttttttcttgccaaggtaaggtcttgcaataacacgtccgactttccactcatccctcatggtgatatcacgggcgatctcacagcagcgatacagttcatccagtccgaaagtctcctcgtttccgcagatctgcaatacagaatcagcagatgtgtaaacgatcatatgaccggtagcgatttcttcctcagccagttcatccaggatctctgttccgctggagctcttgtttccaattactttatgtcccgttctcttctcaagctcatcgatcagctcttttggaaatccggtctctgtaaaagtcttaaacggttttgtgatgtgaagccccatcatttcccagtgtcctgtcatagtatcttttccggtactggcttcttttaaaaatgtataataacccattggtcgctccactgctgcaacctgtttcaacggatgaagatttgcaattccaagcttctgaaggtttggaatcgtaaattcatctacattctgggaaatatgtcccatagtatctgttccttcatccccgtactgggctgcgtccggcatttctcctgccccaaaggagtctattacaatagtaaatattctcttatatttcttcataatttttgtctcctttctgctgtcttacttatggatcttacatatttacaacaacttttgttactaattccttgaaggatttcgctacgcggtctgctgtttcctgcacttctttatggttaagctctttttgggaaattcctgctgccatatttgtgatacaggaaattccacagatttccattcccatgtgtcgggcagccatagcttcgcatgcggtgctcattccaactgcatctccaccccatctctgtgcaagtcttacttctgcaggagtctcataattcggtcctgtaaactgtacataaacaccttcctgaagtttgatgtcacattcttttgcacatttgcggatcacatcctgaagacggcggctgtatacctcactcatatccggaaatctggttcccagctcatccatgttcggtcctatcagagggcttggaactcccgttgtaatgtgatctgtgatcatcatgaaatctcccggtttataggaaggattagctcctcctgcagcattagtgagaaggatttttttcgcaccgagcattcccataagacgcgttggaagaacaacatctgacattgcgtatccttcataataatgaacacgtccctgcatgattacaaccggtgttttctccacatacccaaacacaaaacgtcccttatgtccttttacagtagaaaccggaaatccctcgatgtccgtatagtcgatggtctgttcaatctgaattccatctgcaaaatctccaagtccggatccaaggatcagtgcaacttctggtttgaaatcaattttctttcttacgctttccaggcatgtcattaattttttatacatgattacttcttcctttcttttgggtgttgtcattatatttatgcttttttcataaaggcaattcctctgcaatggtctttccaatgccctgcgcgcctcccgtcacaatcactaccttattgttaaactccatataaaatcctccccaaaaatccgctttctatttctgttgccacaacattgtgtattctttttcaccagtagcatcatcgaatccttcgcattgaatatcgaacccttctctttggtaaaaagagatggctctggcattcttctggtatacgtttaatcgcaatctaacttttttattcttgatatactctaataaaagtttacctataccacatgactgcatttcatcagaaacaaaaataccttccatgtattcgttacttaatccgacaaatccctgaatcattttatcatcttcatacacatagacttccgcctgtaacatcatttctttcactgattcataattacttgtccaatattgctcaggaataaaatcatgcgcttttaaattggttttcaaccatatgtcagcaactctattaatatctatgttctgcatctttctgatcataacgattatcctccatcagctttgatttctctttaacaaagaaactttatcatccaaatatctaatcgatctttgagctaccactgatttatcttccattttttactctttctgcaaattatcagatacattttacggggtttcccatggaaacgtaggttccttttttactcttttgggtttctctttcggcgatattcttttctttttccctttatcaaggaacgaatatctggcgcattttttctttttaggtgaaaaaagatcataatatttacaatatagcattccatttttatttacagaatgaaaacactttttacagtcacaataaactgcggatattaatcttgtattttcaattctactcattgaggtacctgttttttcacttttcattttctattcctctttttggaatttaatcctttgttcttcaaccagtttcactttataatcatatctctttttgaaaatatcagcttgttcatagatccattccatatcatcatacaatttacttccaatattatgctcaaattctttttcaagttcttccttactcatcagtccattggcaatcagaagcgaaaaaagaacatttctgaccatattataatacaaaataattgttcccggagcctcatttggcatttgtctcaaatactttgtaagtgcatcataaaccttacagccgcgattaattgcagaaatctcctcaataatcttatctggcttgccaaaatacctcattgcttcctgtattccttctattgtatctttgttctttttcttcgcacgaatcatttgttcatctaatgattcctcaaaattaggatacgaaaacggtctatacttgaaatcatcttccatctctccctgttttacaaaacaatatatctctttttcattgtcctgacggcgatatagagctttggaaacaataaactctttatcatcttctgatatatccagaaaatatttttcgtcaacaccaaaatacttcgataactggtttaatcttttctgagaaataggctttacaccgttttcccaggcacttacctgctgtcgacttacatccaaaatatctgccaactcatttaaagatatattgcatcttgttcttataaattttaatccattcataaaattgtatcctttcttatcataagttcattgataagcgctctcaacactatgaattgtaactttggttgacagcaggtgtcaatctgtaaccttttctaaaatttatcaaattatcacaacccaaaacatatcaacactttttttgaattatcctgtgtttaacacacttccagataaaaaaggtggagatattgtttgcatttatatgttgcctaccatcatattcatttataatgtttcctacaatttctgaaaaaagcattatagatgtaacttatttacaaaacaatacggataccctgattgagcacatgaggatgagaagctcatgttcccgttcaaaatgtcatcgtagtattcagatttcatttcttctcggtcattcctccgtagaaacaacgatggtatatcttgatataactacggaacaggaaatgacagccttagccaccctctaaggtgaaaaaaatcagaaagtatctacaaaaaggaattctaaaaaagatacactttctgaactgtgtgacctcaggaaaccaaagtcataaaacaatatcttcatctttcttgacaggatatacctgaaatgaggggtattcccgaaaggtagagatatgtttttagttgtgataatttggcgatcctagagttattatatcgaacatacgttcttgtatcaatattataatttattccttgttttcttgtcattcatgtcatacctaatactaccggattttcgcccttcataaaattcaactttaaatccatgcttttgataataatgttctgatctatcaaaatgatctgaatctacagacgataaactacccgatatatattttgctggcgtcgttttacagtatttaaggaaatattccataaggattgatccattacctatctctttatcttctaccataatatcatctatatgaatatactcagcttctccgtaaggcttctcataagtagccataattctaggatgattgctacaggctttatatttgtcgttgtatagcataatccatatatcattgctatgtatccactgaacaacaagaacctcatcccccattttattagtttctactccaataatcacatgattaggttcacgaaacactctatgaactgtatcaatcagcttcgttttcttttgagcttcatagttaatttcctttaccttacgttcatattctttttgtatcgcaagcagctcatttttataaaatgtcgttaggatccagctttttaatcttcccatatttattctttctccactaattcccaaccgcgaactccttttgaagtatccaatgtatattttggaacattcatcacaacttatccaaacatcatgatcacgaaatccaggaatattatcatgttcttctatgatttttcctttcccgcaagggcactcatattcgtatctctccgtatcaccctctcctgcaccatatctcctacttctaagttctgatgcacgtcatacattttcaacgtaatgtttttcaatccattgagtttctcaagtgctctcggttcgctgaaattcagataattggtcgtaagaatctgtcctttaatgcccttttcctcaagccattttaacgtctgcaggagcggtgtcacaccacccatcgtgataaatgcaacactgatctgaaactgatcacagcgcagcaattcatcctccacagatgaaataactttcttcccatcttccggattattcgacacaaatactggcttatacgccagatttgctgccacagaaccatttatataagcggcatttaagccgcttttcaattcattgatcacattcgcatccattaatgtagatctccctctcgtttcgtggtgagcaaaacaaaatactctgctttattataccttatgggagaggggttgtcattgaaatctccaggaagcaagcgtggcaaagacacccgaaagtaacgatagcaacaaaaaaacagttccggacatactgaggttaatcagtgtatctgaacctgtcttttctatggtctttccaatgaatagctgggctggcttttccttggaatggattatttaatgtaagcgcttaaattttagacatgggtacaaaaatccccggccacatttctgcaaccggagcaccttgataattcacatatgattgattattgatttgagtcgtttgcacgacgttcgatttcagctttggcttcttcgttccatggggcaagcctatctaactcttcatcgttcatcctatcattcgggagtttttccagaagataggttagatagtgatagacgtttactccatttgctttcgccatttctaccattgtgtagacgatagcactggcctgggcgccgtttggagtatcacagaacagccagtttttccggcctactgtaaacggacgaatagcgttttcactgagattattagaaaaactgcagcgaccatcttccaaataggtcataagataggatcggcgattctgaatataggtaactgccttatccatccttgatccacggactggattctgtttatcaagccacgacaaaaagccttctactatcggcttttctttctcaagacgagctttcttgatagcatcgaaggatgagtacttcgctttaatgacatcttccaaatgaaaaagctggttgatatacatcatgccttgaacagatggctgtgtataatccagttgctttcctttcggaatcgcatctgtcagatatctgcggatgtgtgcccagcaggctgtccgtttggcatcaggaactttgttgtaaccactgtaaccatcacacatcagatatcctttgaatccctcaaggaattctactgcgttattcccggtacgggtttctgcatatttataaaggatgattgggaattcgccatcttccccgctgcggaataaccacatgtaagatttggtctgtgcacgcctgccggattcgtgtaatacctggagtggtgtttcatctgccattgcgaattccctttttaagagttgccggtggaagtaatcatacatcggggtgaaataatccaatgtattacggattacccagtttgccatcgttgctcttgtgatagcaacaccgtactgtgcccagtctttttcctgccgggtataaggaagactgttacaaaacttctgatacatgacccaggcgatagtatctgccgcagccataccgtgaagcatatgtgcatggccgtcttttccctttttgataacagtaacgtcatcgttattacattccgggcaaatataatttaagctgtatatttcgatcacttttaactttgccggtacgaaggaaagttcgcggcgtacgaattcttcaccgatttttaccagaggagcgttgcaaacagggcagactttttctgcatccggaagatccagatattttttgactactggaatccctttgaaccgttctgcgttagttgcacgggatttccgcttttttgtctctttctcaggcaaaagactttccaacgcttctggttctgcaatagttggattctgttccagttcggcttcattaaataaattcaattgtcccggaacatccatggaacgtttttcactggaagaaccgaaaagctttttgcgaagcagatccacttcttcctttaaattatcccgttcctgagtaagagcctcttcccgtttgttagcggcatctacagttgcctgaagtgtttttatcatttttttcagatcgttgatcatgtctttcaactcacggagttgaaggcctttagaactgtctgccactgcgtttccctcccggtttttgatacttctattataccagaaatcatggaaaactcctaggaaaacggggcgataagaggcttgaaaagcgctgaattttcaaggaaatccagtgcttttatgtgcattttttgccgtacagtttaagtggttttaatagcttttggctgctcgatatcgatgcctgacatcagccagtcgaactctctccaagtgagattccggacttctgatttatcccggggccaccggtaagagccttgggcggtgagtcttttgtagatcataacaattccgtcaggctcttttaagatagctttaatcctgtcgcatttgcgtccacagaatagatagagcgaatggtcgatttccatagagaattgctcctgaataattgcgcataatccatcgatagatttacgcatatctgttctgccacaaacgatatagatcgcatcgacattggaaatgtccgctaacataatggctcctttaatgcatccattaaaattttcaaaagcataggctgaacagtattgctcatacggattgttaatccttttgcttcaatctcaatcgtatgtgaattgtcaaggtacatagaactgcttctttcatcttgaaacagttctgccggagaagtttccggctctatagcaatctgaactacatcctgtttgtgggatgtaagatcaagagtgctggctctgccaatcggatctggtatctggcaggcttttttgcgtagacgggaaacagcattatagaagcaacttggagaaataccttgtgcttcacaccatgcagcatcggttaatccactttgcctgcattcagtcaccagttccatccaatcatccaaggaacgccttggggctcgtttatcactcataatgaaacctccaaatgtagtgaatttctacctcctatcaaagaagtggagtaaaaatctatctgctatcattatgagttaggaaccggcgaatatctagttacccaaaaactaagcgcttactatttaattgtaaaaaattcccgtgaaatgatttataaaataggtaattttacaaagtctattacttgttgttagttcataatttatgtataataaaattcatataagaaatacatgctcaacatgcggcctggaacataaataatctgcaagtttagcgatatacgaggaggaaattctcatgggtaaacaatccaccagggaaaacaaaacaatttaccagctttgccgagaagcggcaggacttacaagagcagaagccagtgaaagaatggatgctgtctctgattcaaaaattgaaaaatttgaatatgaaacacaagaacctacgccttatgatatcctccagatggcagatgcctataaaagaccagatctttgcaattattattgctctcacaaatgcgaaatcggctatcgttatgttccagaaatagaaatgaccgatctgtcaaatatcattttggagacaattgccagtttaaatgaaatcaaccctcttaccggtcgtctgatccagattgcccgtgacggtaagatcagcgatgatgaaatgaaagattttgcttatatcagtaaaaaacttgatgaaatttctttagccatagactctttgaatctttgggtagataaaacagctggagaacaagggctcaatcttgaactcttaaatgccgaaaaagaaaaattaaaataatccataacaccacgaaaggattacgactatagaataacaccaaccgcagtcagtgtctttaaagttgaattaatctatagaaactgctatcatattttatcagaattttccaggtaaaggaggacatgagtggatcatgaacgtaatgccaatttccgaaatcatcgaaaaagtaaccataatttgcaaaaaaaataacgtaaagcgccttgatttattcggttccttcgccacaggcactgcgacccccaccagtgatattgattttgtagtatacggctgtaataatctaatgcagttagaagatgatcttcagcagattgaaacactaaggaaaattgatatttttgactttgacagtataaaaaatgagtatttattggaggatataaaaaaatatggaaaacaaatttattaaccgctataacactttctgtaaaagtctctccaatcttgcaaaaagcaaaacagccgaccccaagaccgattttgttctcgaaggaactgttctcaatttcagtcttactttcgacatctcctggaaagttatgaaagatattctgatcaaaaaaatgggaattcttgattttgcagttggctctccacgcgaaactctgcagcaggcatttaccaatggtattattgatgatgacacctggctgcaaatgctgaaatccagaaatcatttgtctcatgattacgatggtactttcgccgcagagaaatttcaggacattataaatatttattatcctctttttgaaaaattcaaaaacgatgttgcgaaatactataaacagtaaatcaacaccagtgaaacatttttcacatttaccactcttcacatttaatatcacttatctgttcgactggaatgaccgtttgatccgtcatgattatagcatgctcgtattcgtctaccttttttacaacaccagaacacacaacataggagcctcctgctttttttgcatcgggaataaaataagttatcgatacattctgttctataccgatattatttctgattatgttgattttttcgttcagctgagcaatcacttcctcactcagttccaatctttcatctgttaatcttgctgtttcttttatcgcagcatcatgcccggtcaaggctgcaaaaggagcaaattgcgctgcccgatcccgaagtggcatttgcggatgattcttagagaccggatgcggtaaattaatgatatcgtcataagaattatttttcatcctctttcaactcctttacgccttatgaccgccaatctgttcatttctgtccctggcggttgcaccttcctgaagattcatccccttcagtacagcgttttttccaaatttctttttgatacggagcattgcttcctgcatacgtttttcgcgatccagcgcagccgcttcctcttcctgctttttcctttgcgcctcataatccgtaaaaagatccagctgctcatatacttcttctttcttaacagaactttcatccacaagcctgttcgctgtgatattgattcttctgacaagcaggtttctgtcaacgatcctgtcatataactctattactgcatccgttatcatcttggttgaggaagtctgtcgtttcagattggtcgttccatgtgcatgtttcggaattcttcttccataacggtcgatcgtaacctctccatgatactgctttctcctgtcggcattgttcagattctcaatatcataaccaaccgtcaacacgatctgatccgttacaagcttcttatccaccaaatccaaaaccatctggtccgccatctctttaacgactaattttgctttttcaaaatcataagggcaatgaagtacctgcccggaacaaacactgttcgtttccggcttataagccttgaccatttccatggtacagggctcatatccccaggcatggtcgatcagcagctctgcattaacaccaaacaacctatataacagttcttcattatataactcattttcttttccgatggaacatctggcaatatctcccattgtataaagcccgtattcttccagcttctttgcatatccttttcctactctccaaaaatcagtaagtggtctgtgaccccagagtttccttcggtatgacatttcatccagttctgcaattcgtacaccatctttatctgctttaatgtgcttcgccacgatatccatcgcaatcttacacagatacatattcgttccgattccagcagttgccgttatacctgtcgttttcaacacatcctgtatcatggtcattgcaagttctcttgctgtcatattataagtatgcagataatccgttacatccataaatacttcgtcgatcgaatacgggaaaatatcttccggcgcaatatatttcagataaatactgtaaattctggtgctgtattccagatagagagccatccggggaggagcgacaatataatcaatctccagttccggattagtatctaattctgtgctgtcatcagaggctccgataaaagttctgttcggcactttccacctgcgggcgctattggcttcttttactttttgaacaacctcaaataaacgagcccttcctggtatcccataacactttaatgctggcgataccgcaagacagattgtcttttctgttctgcttttatctgcaaccacaagattggttgtcaaaggatcgcgatttcgttctttacattccacagacgcatagaatgacttaagatcgattgcaatataggttcttttcttttccatcattctacaccgttactgaaaacttataaaaagttataaacttctatgtttcattcctacttcaacgagtatgcttttgatgatataaatatctatctactcacaagttcttgtactctccataggcgtaaattccggattaacgtacccgtacatatttgcactaacgttttagtgtttctatgcaatcaggaaattccacacatacgctgatccaccagttcaacccatcaaaagatattctcggattcatgtatttagcatctgtaggaatacgaccatgctctgcaagtcttacccaatttagtttttgtttatttcttttcctgctcgaagaaaatccttcaaacttaacatgagtattgctgaattgtatcttaatattatcctgatagaacttcggtattgatctcttttttggcttgaatcttgggaatttctgcaaacctttgaaaaagttcttataagcggtgcaggcatctttgatcgcctgtttggttacattatttgaaatactcaataaccatgcgtattcatcagaatgtctaagctttgtaaattcttttctgagttctgcatctgaaatgaattttccgcctttttcatagttttctatttcccttgccaaagcccagttataagcaaatcttgaagcacctgcgtactgaaacatcttagttttctgtatattatttggtattaacattacttttatggcttttaccatctactttctcctgtatcaattcccggataagtttcttggctttattcgctcgttttccttgtaatttgcaactgaatactgtgattatctgaaccagatcttcaacaagttcctactgttcggatttttcagtattatcaataatctcaatctcacaattataaagcgaagcgatatattctatcaattcaaaaccaaatcacaatagccgatctttatataaaacaacaaccttttcaacctgattttgagatattcgcctgatcaattcctggagtccttttttcttataatcaattccggaaccgatatcacttattatctcaaatggctatccttttgccagaagatatgtcttaacattatcaatctgtcgttccagatcatctttctatttatggctggaaacgcgacaatatccaattgtaatgcgagttttaggctttacatttattacctggttgagttgctcgtcagaataatatctatagccgcttactgtagtatgatgcggatgaagttttccattggcatcccaatttcataatgtctgggcggatacgcctataatttttgaaaattaatgtatagaataatatttactcaaagcatcaactccttccaataatattccactctaatatcttataaaactcaacatgtacttatatgattttataatttatatttaactgttaataacctcccgattctcctgtgttctgtttctaattcttatttatcctgaccggaaatctttctcatcttaatcagttctgccacagctttcatggtgcttactttcgccctggtaaaacatcctgtatcttacttccacgttttccagatatccggctgatatccaagagtggattgttttccattacggacaaccggtgtcttaatcacctgcggattttccagtaccttctcaagtttatcttcctctgcaatatacttaatgagcgcaagcagatccttatccttgccctcccagttgatcatattttccagtccaccatttgcctgggcaactgaattaaattcgcccttactcatgcccttttctttcatatcaataaactgaaacttgatcccacgttccttaaagaaacgttctgctttctttgtatcattacacttctttgtcccaaaaatctgtacgttcaaatcaattctccttatccattgccatatgtatcattttctcaaaggattctctaaaatgctcatcatcctccgatgttcgttttcgtggtccttttaaatgattctttccggatgcccttcgtgctttcttattcagatgccgttccataagcatctggtcaatattctcattggtataccatttcccggattgatgaatcgcatatgcgccctttccaagtgccattgccgcaactccataatcctgtgatacaacaatatcgcctttatggcaaatgctgatcagtttataatccacggcatctgctccggctccaactacgatcacttcactgtaatcagaagataacacatgattggtatcacacaacaacgttaccggaatactgtgctcttttgcaactttttcaacaataccgactaccggacaggcatctgcatcaacaaaaatctgcatatcttctcctttaattacacataaatggcgtacgaacctcgatgagattaccactcggatcatacagccttacaagcttctgcccacctgcaagttctgttaattcagtggcatatcggacgaaatacttaccggattcatattttgcaagcaatccatctatgtcaaaatcctcgaaatacagttccatcctgttattgaatggagtggaaatctcatctagtgttttcccccatacgtcggcgtcctgcaaaacgagtccctccgataagattacattaccttcattcttaagaatcacttgcagtccaaataagtccttataaaactctatggatttttctatatcatctaccacaatcagtacgtttttcagcatatccgtcacctcacaatccgctttgagtcaagcgaatattcgcaatccgcatgcggttaaataatctttccagacaaatgatcaatttcatgctggcaaatctgtgctgtccatcctgacaatttctggcgctttttcttccagttaaagtcataatactctacttcaatttcctggtatctggtcgtcttacgaacaccgtccagggacagacagccttcttctgtctcatacatgtcatggcatgttcctggcttgtgatgcaaatgtaaaaagtaaagttgtagccagaaagaacctttcatcagcagtattaggtagcgaaggtctgtttaatctgagtttgcagggaaatggtgtagctgcactggagtctaatgttcccgaagatgaattgattgaagtcatattggaaaatgatgaactgaaaattgatggaaaccttgctgtatgctggtcatcaaatcttgagtttaccgtagaaagatctacaaaaacacttgtcggatctgcagttagcggagagggtctggtaaatgtttatcgtggaacaggacgggtactgatgtgtccggtcgcaccgacaacttccttgtttgagtccactaacaccatggcagctaaagctgctgctaaatccagcaatacatttggaaaataagtgtaaaatacattctcttgtaaccaacaaacgccgatataggattataaaaatcctgcatcggcgttattaatcgtgatcattttattttctttattcagatgaactgcttatcatccatgcaaatttttaattcttttcaattccatctggcatatgatctttctcagttatttttcgaatgacccggcatggatttccaactgccaaactatacggcggaatatcttttgttacaacactccctgcaccaattacacacccttctcctatggtgacaccaccgcaaacaaccacattggatgccagccagcaattatcctttatagttattggcttcgcatattcaagattataaaaacttccatcttctcttttcctaatattgcgttcttcaggtaataatggatgcataggagttgccaatgtaacatttggaccaatcatcacattatcgcctatatgtatttcacatacatctaaacatgtaaagttaaaattagcagagctgaatcttccaaagaacgtattacatccgtaatcaaaataaacaggcgcctgtaaataggggagttcctctgttgctggcaataattccctcaatatctgtgcttgttcttcttgatcatcttcatctgtcgaattgtattttcttgctaatttacgtgcattcacgcgtaattgctccaattctttatccgttggatcgtacaactctccacttagcattttttctctttcagtcattttcgataacctccaaattcaaagttataaatatcagtttccccactctctcatggtctgcaatattttatctaatgcttttgcactttccgtcatcaaatacggacatagccataaccatattatctacttttagatcaccgaaaaaaatatccatcgcagaaggtatctgtttaaaattaatttcaacaatttcttcatagttctcttctgcaaatctttcaactatatatgtttttcctgtttgtctggctccctgaattacaagacattttttgttttttgaatctacccattttttatgtaatgcgtcacttttctttttaacataaaacatctcctgttaccaaataatatttttatcaagaacaactttgtaacatttttaattactatatttcttttatcatcaacattttagaatattatatcattgatcaatatatattaaatgactttttccatttcatacaatctcttctgaagctccggttcaaagaaattctacattccttcatcaaagcttatgaaaggcttctccatatcttcagttgtgaaaatcagggcattttcgttacttttcttaaccgcacagtctgtgaaatttttaaattccttatcagtgaccggctgctgcatatgcttaacatcaaacaatacttctgtgtcaaccagactgtttcctgttcagggtttatttgaactccaatattaatattaccatctgtgaataatattatttcatttttcatcaataagaccttacacattctaccctatcacactcgcaccaaatggcatgaaagagagtcttgccatcttgaagaactgctttccaaatggaattccaactatcgtaatgcaccaaatgcaaccaactatcaggtttccaagtgccatttcccatccaaaaaatataatccatataagatttaccagaaatgaaaacatgccatttccatacacgatttcttttccaaacggccaaaatgccaaggttgcaaatttaaaacattgcagacctaccggaattccaataattgtaatacaccatatgcaacctgcaaaaatccatgccagtccgcccagtaatcctccaaatataaaccaaaggatattacctatagttctcatgacaacatctcctcatccaatgtctaatattcttttgcaatttcctctgttatctcatatatctctttgaatttttctaagtcctctggagatctgatcagcatgatttcttcgatttttccggtccgtatgtctttgaaccctgctacttcttctccagtacaaatgcttgcacgaataactggtttcatatgttctcggtcatatgtttttttcacgattttctttttaaataatcccatgctacctccccatctccgaatatcttcggtaacaagatcaactatctaattcctggaacatttttctgcatcaatcgcaagtacgaacatcaacgcatccaatgcatttcctggatcctgcacatcaataacatatgtatcagtcatatgaaacagttctttactaacccgtgcaattgaataaccgctttgattaagaatgctatagtcccattccataatggttccatcaatatgccatccattgtaatcaatattataatgtggcgtcaggaatgagaattctttgctcaggcatccgatataactgccgtttttataaatttcaaatttaggaagaaaagtaagtactttctgaacaaccattcctacttcatttccataggcatcataaattacaagtttatgtccccaggacaactggccttttactacataaacagtgttgcctgcttcatcatagatatcatagctgtcaaaccatgaaaacagcctttgtttaaacaataacttcataacttttcaccgctctctccaacagatataattggttctttataagtatcataataccatgccggaacaccttaaaaaatatgtaaatcgaagaattaactcatcttatttcacggattatgataaaacacatattaccagctataaatctctacttgttcacaaaaagatataaaaaagaccatctactgcttgtttacggtaaatgatcttttcattgcaatatttaattaaatatcatactgagccgattgttcacgtatcaatttacatgtttctcattgtattgctcgccctattataaatacaatttgttttccttcctactggaacaaacctttttcattttcagtccagcgataaaactgacaagcttactgtaatttcttgctttcttcggacagactgctacacagtgcatacaagaaatacacttatccttatcggtcatcttcggattgtccaacggaatggcacctgccgggcattcttttgcgcacagaccgcaggaagtgcattttccatttgcaacaggtttgagtggaacaccaccatattctcgatatggtctgtttcccggaaatgcaggtgtcctttgtgcttcgctgttttgcataatctttgcggcaaattccagcaattccttttcatcctgctgatccgggcgtccggttccaaattggtgcatcagggaatgctctgcgactgcctccattcctgcgatacatacaaatcctgatgcctccagaacatcctgtagttccaatagagtatcatcaatcatacggtttccaaatactgccacaagaattgctttcgtaccatctgcctttactttgcggaacatatccgttacaactgatggaatgcgtccaccgtaagacggtacagcaaccaaacataggtcctttttttcaaatttcaccttcatgagtttatttggttctttaattaggtcgatttcttcagcatccagcttcgtccctttcgcaacaatatctgctactttctctgtacctcctgtcgggctgaaaaatatgttataaaatctcataatgatcctcctactgattccgatttgtttattgtccttttataacggttgaccaattgttttcaatagtctttatatgtttgaaaggaattcttctatcaaactatttatcatctccggtttatctgtattagaattatgaccggccccttcaatccactttaaaggaattttcgtttttcgatgccattctctgttataccttatgcatgaaccggcatgatcctttgtaccacatatcaacagggaaggacatttgatttcatatggcagatccttttccattgcctctgccagaatacgaaatccatgcccggcaatttgggcataacgatgctgatcaccatcatagaccagcatcatttccttcatcagatttctgccatactcagaagttgcaactccctcagttccggatttcaaaagcaacttccatgggtaatatgcatatactggttccattcttttcagaagccagatctccactgctgtcacatagtttctctggagcggtgctgaatcaatggaaataaaacctgccagccggtcaggatacaattgtgcataagcctggcctacatatcctcccattgattgaccgattataattggttttatgatttcttctttttcaagaatcccattcagccattttgccttatcaaacaagtcaaaatcaaaccggaacggccaggaagaggcatgagccggtgcatcccatacaataatattatattttccatcgaagtacgcaacctgtttatcaaacagtctatggtcagcagtcagccccggaagaaatacaagcgtcgttgtatccaaactcagaatacttgaccaatagtgaattgttccgcaaggagtttgatatgtactttccttcaacaaatccacctccgcaattttcatttttctcagttacaccaactgaaaaactttaactattttcatattggttttttatatcaaatacagtctgctacatctcatccggcttttgaccatcgtgggctttccattgacactccgtcaatttcatatctgtaaataccgctttaaacgatgaatcttccggactgcatgcataaattccaaatttgatttttcctgcaccagcccacatatgacaaatcctcatttgcttaaaccgtattccatcctcagaacattcaatgcaataatcatcttcacgtctactgagacgataccacatagatttaatctctgcatcaatttccgtagttgcccaatctgaatatccattgtttgtcacaacacttcccaggtgctgaaaatagtcattctcatattctatagaacctttcaaccaattctcactgtcaagatacataaccacaccgcattgatcaaagcgatgatggctttccttaaaatctgttttcaccataaatgaaaaaaacttttcctctgtttctatctgcaaaaccggagcattatcattgcggaaatgatagtaagttctttgccacaaatcagttccaggctgtgtgataatctcaattttgtcatctgtcagcgtgtaatcatcaggttctctcgtccacttaaaatcttttatattcatctcattatccctctaaattccgatttcacgacatcatttctaatacagattttaccgtactttttaatctcagtccatcctttatacccaggcgataaaaaaactcttctgtctctgctccgctggcaaatatttcatcacaatacttcgtaagcacttcctcttgttccggagacagtgtttccaaaagcttctggtattccttctctatattttcattaaatggctgtgtatcttgatttgatttccattcagaatatactttgctcatacgattggagaacatcttatcaacagactcctctacgtcttttgacatctttgagggagactcttgcttttgaactttttcgttcttcgctttttcaagtgttgactcatcaatatagtgaataatttctctcaggtttgccttcatagattgcaggtattggtgctagaatataaatagtacaaaccaaaatgagaaattccaaatacacatagacatgatacaatagaggcatgctgaaggagaatctcatatggcaaagcaacatgacaaacaatttaaacttgatgcagtccagtactatcaggatcacaaagatctcggagtatgtggatgtgcagaaaatcttggcatcggatacagcacattaacaaaatggctgaaagacttccgggaatcaggtgatattcctgttcgtggttctggtaattatgcatctgatgagcagaaggaaattgcccgtctcagacgtgaattacgtgatgcccaagatgcacttgatgtgttaaaaaaagcaatcaacattctgggaaaatgacggaagccatttatcttgaagtgtctaagaagacggaagctgccaaaaaggctggacgccgggtttccgtctccggaatgttgaaatttttaggtgtctctcgctcaggatatcttgcatggctccaccacgtaccttctgatacagaaaaacgtcgtaaagctgtaaaagcaaaaatacaggatatttatgatgattccaaggctccttcttaaaatatatagatttcacaaatccctatcgatatacattcttctgtcatagatgtataaagattttgcacagttcgtttttttcataaaacttattctgtttttcaacttctatgatataatgctttattataataattcccatggacaaaatgaggtgaaccaagtgaaaaagaaaacacttgtgcctcttatcacttttttactgggcatatgccttattagtttgattgtatacaaaacagacacccacgaaaaagagcagagacacataacagcacaattaaacgtagccacctatggcgaacaaataaagaatgaaattacaaatggaattgagatcacagataccttgaagtaaatcttaataagtgaagatggcgaaatccgtcagtttgaaacaattgcaggaaatcttatgtctgattctattgaaagtgtacagctcgctcctaatggtgttgttacagatatttatccggctaatgaaaatgaggcaggtaagattgatttgatccatgataaagaccgcggaaaaatttcctgttacgcaagagacaaccatacaatcattacgcagggccccttcaaattaaaacagggaggatatggaattgcagtccgcaatcccatatacctgaaagataaaaacggacatgagtatttctggggatttactattgttatcctgcgtgttccggatattttttcagattcaatcagtgcactttcaaattttggatacgaatacaaaatttcaaaaacagacgctccatggagtgacacttataaagtggtttatcaatcagatgggcaaataaatcgtcctgtttcttatacatttacaataggagacgaaaactggaaatttgaagtaactcctaaaagtggatggagaaatgccacattactgataatcatcatcggaatttttcttacaataagccttctcctgtcagttcttaccagagtatgtttagtagcaaaagaacataagaaaaagtttcagatactggcgcgcacagattctcttacaaatatttataaccgctatggatttgatgaatttgcagaaaaaatgattcaaaaaaatccaaaaacacattttgtggctgcgctccttgatatcgatgatttcaagtttattaatgatatctatggacataattacggagacagggcactaaagaatcttgcagacagcatgaagacttttttcccatccgatgcattactcggaagaaatggtggtgacgaattctgcattcttttaccaaattgtacctttgcagaagcagatatacagctgcagaaattcaccaaacttcctaaatcattctcataccatggtaaggaacatgcattttatatttctctaggatatgcagaatatccaacatttgcatccaatcgttcacaactcatgcgctgcgcagataccgctctttatgaaataaagcttcatggaaaaaatggatgtatggtctacagagaaggacttcggtcaggtgcccgcaaacaacttggattcgcattcaaggatatctctgaacatcttccaggtgcattcatcatatacaaagctgacaaagaagatgatgaactaatttttgcaaatgatgaatttcttcatatgtccggatataaagatatagatgaactgttcagacttactgagaaaagttttcgcaacttgattcgtgaagatgaacagcaacagatagaatcaagtatctgggaacagattgacaacggcaatgaaaatgactatattcactttcatcttcgaaaagctgacggaacttatttttctgttcttgatcatggaagaattgtagaaagcccgcaatacgggaaagtattttatgtattgttcatggattgggaagatatgcatattcgttacaatgataaattcgcaagataaaatattgcaaaaaacagagcgtatgatctattttcatataatgtttatgtcggcaagctctatcaaaaggaaatcgactttgttgctcagagaagcaacgagaagttttatattcagatcagcgacaacatttccgggcaggaaacatttgagagagaatgctttcctcggcttcagattcgagatgcttatccgaaaatgattattgctagaaccaaacatccccaatatagctatgaaggaatcgtaatttacgatatagccgattggttactacaagaataagcaaggcgaaatatctccagcattctcttttgaaatgatggagatatttttattatgacggagattgcagatgaattcagacgaagcatcctacgaaaagagttttatatggatgtactgaactgtgatccgatgtcttttgacaaggaatgcaaactgactatttggtggctacaccccccaagcccctgtagaataaataacgccagtactggatatcaaaaatcccgcaccggcgttatttattaaaatattttgttttttaatcttcaacactctctactgaaacttcttttttcttcctacttttaccagaaatcatcttgtgtcctgtataaatagccataatcatgcaaagcaaagaacttgctgcaaagtacttatggccttcttttgatcccttataacctgtataaaaagttccaagcattgtaatcagtgcaccgataaaccaatatttatgtgatttcattcagatacctcctgccgtttttcttaatcatataccttttaaaagatatatacaaactggaagttagcgatttctttttccggtattctctgtcccacggatttcctcatgatagaaataatctacgatcaccggatgtccctgcgggactctgccataaggcatttcattatccacaaaggcacaatcatacttcttagccattttctcagcttttacttcaagtgcttcaaagtagctgcggttatgcttgttatagatctcgtcgtaaagtggtacaagatcaggatattttccggcgatataattcataattgtctttttgaaaccgcctcgaagattgagattttcgagccagaacagatcgcactgatcctttacccgctcaaagattgcttcaaaatccgtgataccgggaaataccggggatacgaaacagactgtacggatacctgcctcatatacctgcttcatagcagcgatacggtgctcaatgctcgaagcagagtccatatcgttcttgaatttttcatctagtgtgttgatcgaccatgaaacggttacacgtccaagcttcttcagtaaatcaatatctcgtaccacaagatccgactttgtgcagatcagaatatctgcgtcactgccgatcaactgctccagaagttttctggtattcccgaattgctcctcctgtggattgtagccatctgtcacagaaccgatgaccacccgctgtccggcatatttcttcggatttttaatttccgtccaatgctttacatcaaggaaagtgccccattcctccttgtgcccggtaaagcgcttcataaaagaagcatagcaatacttgcaggcatgtgtacagcccacatagggattgaccgagtaaccgcctaccggcagactagacttagtcatgatgttctttgtttccacctcacgaatgaggattccatttattacttcttccatgatttctgtacctctaacactttattaaattcttccggcatttcctgaatcatattttcatcccctatgatagggacaaggtcttccttcataaacaccggaatgccgagcttatgtgcctggtccgccagagaccatgcccattccggctccgtatgaatcttcctgctctgagctccggtcatggtgcccacaacgatccaattgattccggaaaggtcaactgtgccgggatcgtcgaataacggctcaaaggtaacatggtaatgttttgctctgacgtttttccgaagggcgtcgatacgccacagttctgctttcctcgtcaccgtaacgccaaaccatgcgttttccaaatcggtatcaaaatccagcaaatcaggtcgcttggtaaggaacaggaactgatgctgtggattttcacggatctttgcaaatacctcgtctctccattccggcttccatccggagagatcgctcatcccggtaagaagaaagttctgcggacgtttcttttccatcatcttgagcttacccggaaagaattcagggtcagcgaagtcatcaatcatatgccagcgtttcacgttgttgcgggcatagcaatatgtacaccccactgtgcagccaatgacgatattcatgttctgaatctgatctttgatacaaatactcatgacttctgccactcctcaagattctttctgatgcggtcgagacatttctcaaaccgggtaatttcttcctctgaaaaacctttgtagtaaatactgcccatctcatcagatacagaatcgtactcgccctttaaggcatgtgctttctcagtcagaaacaggagtgttttccttttgtccgtttcagactgaacacggcttatcaacccttgattttccattctttccagcatcgtagtaagagatgttatcgctaatccgcatttagtcgagagtgacctgattgagataccatcctcctgccacagcacataaagaatacgtccctgggctccattaaacgcatcaatattcttttcactgagaatcttctcaaaaatccggtctccaagctgttttatttttgtgacaagaaatcctccattcatttccatgcaaaagctcctatatagtagtttattaaaaacatactatataggagctttattgtcaagagtttatatgtcttaataggtaaattccattttttcaattctccaaactggaatttgacttgcctattttcttaaaatctcatgtggagcttctatttcatttgccaaggtatgctctgttaactctgacattccattgtgcattgttgatttcaaaacattggaaatttactcactacaagattactggagatcatattttgtccgagattattatgtagaaatggattttgatgataatatagtaagaacagaagtattttatttgccagaacgtcaataacaaatatgggaaagagatggtactacatgggaataattaaatattttagaaaaaagtactgggaagcagccattttcagaggtgggcgacgtataccatttacctgtgatggattaacagctgttcctgatagcgcctatgtattgtttactgaaaaagagttagaaaaaatttacgaagaaagagatatttttcatgagcggctaatgcatatgattgattctttttaatcacatgtacatcagagtttatatattacttatgatattgtgccggctttgtcgctttgtatcagccgaatgaatacaagaaaaggagctgtcgggaaatagacagctccttcaaagaaaatttgcaggatacctttcttctttccttctgtaagttcattccacccacacttttctctggatcttttcacctgttcacttgtaagcccagatttcttgccattcaccctttcaagaacctcttctaccgtctgctgataaatttccttcatcacttccgcctcatcgtttctaagtatttactacctgaatttcttatgcaatgaaagacctctttgaaaaaaatataaaaaaaagaccttcattgcataataaaaaatgcaataaaagtctcaccatttccttatgataccggatgcttccaccgtactgacaacatcacaaacgcaatttgttaagcgcaggttactcccctttattggatcaaatcatatacccaaagtaacatgattgtcaagatactttatcattactttttcattttatgttatactttttacatcgttaacactattaaaataaattctccggaggtgaatcaaatggatcatacgaataattcctgttgttgcggtgaagcggaacatttttccggatgtctgatttgtggtgcttctattacgtatcgtgctgaaagctctattcagacgtgcagcatctgccataaagagcaattaaccaatgcggtctgtgaaaatggtcactttatctgtgatgcctgtcacagctatggcacatatgctccggtaatcacaacactcagagacagtacagaaaaagatgctttgcttcttctggaaaaaattatggatcttccatctgtacatatgcatggaccggagcatcatgcaattgttccatgtgttcttctgacagcgtttcgcaataatggagaacatatggattacgatgctgcactatctgaaatctgtaaaagagcgaagcaggttccgggcggtacctgtggttactggggtgtctgtggagctgctgccggagccggtattttcatgtccgttatgactggatccagtccacttcacaaagatgcatggccgtttcctcaaaaacttgtttccattattttatccagactggcagatgttggtggacctcgctgctgcaaacgtaccagcagaattgccatcgaagaagccgttcatttttacagtcagttttgttctgtaaacattccgttgtcttctataacgtgtaaatactgcgaagataatcgcgaatgcatccaggaagattgtccatactatcctgaataacaggcaaggcagtgattccatgataccacgaaatcactgccttgtaactcgtttgccaggatacagcgccccatcttcccactttgcttttttgcagttccatgaacgaatatccttctcttccaaaacactcctgattcgttcttctccattgtccgatgtaaaaagcgctgtaatttccttttttccatctacaattttcacacaataatctaccagttccggaatctcaaacagtaattcatccatctctctgatacttcccaatggatccatccgctttacaaagtccaggcgttttatttcacttccacagaggcatcttcctggaatgatccttgaccagtcaccggttcgatatcgaatcaacggctgtgcttccattccaatggttgtaatcaccagttctccccatttaccgtccggcagcacatttccgttctcatctataatctctgtaatacaatggttttcccgcatatgcatgccctcatgcgccgtgcagcaaatggcacctccaagccccatctctctggaaccatagtgcggccaaagtcgtgtttgcagaatttcttcgattgctttcatgacagttttcggacaggcatctccggataccagtgctctttttatactgccttttccgcacattcgaagcatggacagcaatgccgtcggcattcccacatacgtatccggctgctcctcttccagaatcctgttcagttcgccataagttcttcctgtcccggttgaaagaggttttgctcccagacgtctgattgcctccgcgatcagttctcctaatccaaaaggacctgaaaatggcatagccaccatcgttatacttccaggataaataaattcacccagacctgccataaaaagttctatggtgtgttcacagtctccctctgtatagaatacacgtttaccggcaccggtagttccgcttgtctgttctgatatcactttctgtacttccccctgggagcaaagcagcatcctgcctccatctcgtgccagatctgtttctgtcgtaaaaggaaggcttctcaaatctatcaggctttccagtctttccggcaaatctcggtaaaaaccctctcgttctttctctctcttcagtacaatatttaatttctccagctgtattctgtgtatttcatctcttgtaatctctgtaataccttcctgcttacagatcattgcatctatattcgatcgtttcactttctgtataaatatattcctttcgaattcgtcagattatatgcacaaaacggcaccattccataatcagaatccacctcgcagatataacatcttttcagacgttcaagatccagattccatgcatcctgaaaaatcatccctgatactgcaaaagtttcattatgaacccggatcaggaattcatccagcgcatctgtctgtgtcatttctccatcatcaaatttttttgtgctatagctccactgattttccacatactgtctggaattatcgctggtagtacaacaacatcctctgcctgatttcttttccaaaagtttcagttccctctcaccttttttcagataacttgcatgaaaagaacaatatggattctctgctccaccaccggcgaaatccttgcttttcataagcccgtcagtctgttcctcgatcagcttcaacatctttggtatggtaatcggagcttgtggacgctgctgagaacatctgccaaaatagctgatcggctggaaatgtactcctcttacaaatggcatatgatccatcgcaaacttcagaatatctccaacctgcatgtcatttactcctggcgcaatgacaggtaccagggcaattcccagttccgcttccgaacagtttaacacagccttttctttcagttctatcatagagcgtccgcgcaatgtctgatacacatcatctgtgacaccgtcaaactgaagaaatactgtattcagtcccgctttttttagttttctggcatatcctgcttcctgcgcaagacggattccattggtattcaattgaaaaaatgtaaaccctttttctctacccatatgtatgatctccggaagatcctcccgcatggttggttctccacctgagagctgaatattgaatggtcctccatgatccatcagaaaatcatattgcttttctatttcatcaattgaaagatcaccgttttccagacattctcctgccgaagcaaagcagaccgggcagtgcatattgcagcgctttgtcacttccagtatcatacaacagccttttcgttcatgctcctcacagagtccacaattatccgggcaggatttctctttgattttgggatttaccggagtctccgcagacaggttttctcttccccaggaaagatactctgctgccgttccttcccagatcagtgtctgaaactttccgtggatatcacattctttcaccagataaatgccatcttcaccgatacattttttagccgtaagtactttcatacatatcgggcatacactttttgttttacccagcgtaatcatagttccaatattccccgttctgtcagtatttctatcactttcgtataagtatctgcaatcagcgcaggacattgctccataatcactccccaatccaaattagaagtgatatccttacaataaaaagcaccaaattcttcttcggtcttcttatggaaccactgatataattcctgcacagccggtttcatctgtatatcttctttctcctgcggagccagattgccaaggaacaaacctatcgcacaggctcctcctgtcaggcagccacaggtatctccacagtaaccgatcccaccgccaagacctcccagagcctttacaagctgtggattttcctcacctatggcttccagtgtcataatcataaccatttgtgagcaatgataacccatactgctaagttctatgattctttcataaagatccatgtgctactcctttctgccaaccaacatggtatagcgcagcttctttcctttatattctttctgcagaagcttatactcttcgcaacagaacgaatcattccagattgcttccagataatattcccgccaaagtaacgtctgatcctcctgtcggagaatggtaaatcctgtctgttctgccatttccaaaagatttccagtatccagatctgacagtaaaagaaaaccttccttttttaaaacgcgccaacattcagatagtgcatttttctgatctctgctgacaaaaaatgcacactggctgatgcaaagatctatactgtctgatgaatactgcaaatgcagaaaatcgcctgtttccacatcactgccccgtgggaaaagatccacaccatgtgcatccagcccaaatgatttcaggattcgtaccgtgtctccttctcctgctccaagatccagtgctttcatttcttttttccattctatgttctccagaagatgaagcgtctgcgcttcccctcccggatgcctgttcatctatttatcctccaatgcacgctccaccgcgagcacttttccaagtgcgagttcttccggaacatacacaaacccacactttggacagacaggcatttccacaggaaacccattttccagatacataaattttgcttttccttttacaagaggaaccttacatttcatgcaggtcagctttccttccggatcaatcgtataatatgttctttctactgccattactgtcccacccttttcataatattcattcgatgactgtatgctctgtgtaccagatatccgtcttctgtttccacaaaccgcacccagaatgtgacatttcccagtctgcttcttgtcaccagttcttttgtttcttcatccaggattgcctcctgattttctctgtaatctgataacacacgttccacatcacttttcagtatcatgcgctcatccatcatatggattgcctcttctgtataggcaacagtatagtcttttttctccatgatcggttcctcattccagatattttttaaaagtgtctgtttcaatatgagcctgttgtagcgtttctcactgatatcaggcatattgctggcatttgcaccatacagaagttccatgatatgtctggattctcttccctctctggcaaatcggtctctgcatgccatgcagtatgtaatatatggtgcatcggaacgttccagacacttttctgtcattttcgctgccatatctttattggcatatgccgtcagacctccatatccacaacatggagacaaatctctggaatattctgtatcttcaacgatacatcccatatccgacaaaagttgtcgtatcgtatcttgtgtctgtgcatcccctctggcaccacaggcatcatgtatggcaaccggtatctccagtcctttcgcctgctgtggaagtccgatttctctcaaaatttcccagattcctataacatgtgctccaatactttcttttagctgcttcatgcagcttggacagcctgcaatgatgatcggatcaccaagcttggccagttcctgtttcagctgctcatttactttttctgtcatttcatagcggcccgcccattcgctgattgcaccacagcatcccagcatcagagcaacacctctatctacccgattacttaaatcttcgtatgcctgcataaccacatccggcgctatcgcccctgcctgacagcccgggaaaaatacatatctgcaagtttcatatcccggctggggtctgcttaaaaaagcctctgaatttgaaaataacatgtccatcagtgcaaattcatgtggcgccagcggcatcttatctgtagataccatattttctcttgctgacttgcacacctgactcatatcaaatccattcggacagatcacagtacactgtccacagagggcacaggcattcatcggtttgttcatcggatgatctcccatgataatctgcgtattattatagatctcacgggctaataaacccggatgtttttgatattcacttaaatacacacatcctttcatgcattcgtcacaatgacactgaatacatcgttttgcttcttctacagcttcttcttttgaatacccatcctgaccacagaaaatcttattcgatccatggattccttccatgttcgtataaagcttggtagtcactgctccttcactgcctctgttgctgtgcggcgataaattctgtaccagaagatccactgtcaaagctgcccgctttgcggcaaaagccgcatccatcacagattccgcaggtccgctgacaatctttgcctgttctcttaacataatctcgacatctgctgcttcttccggagctaacatttttgccacttcttctgatgcgcataccacatctgccagttccattttttctctgataaacgaaagattcaaactgcatccaaattcaaaagaaagatccatagatttcagacgtttcgcttcattgctgcggtctgattccaaaagatgtccggctgccgctgcaatatagctttcataatcttcttccttacaataaatcgtcgtaggatacattttcttttccagttcccccgcaagaaacagtggaaataatccagaaccaaagattgctgcctttttcttctttctcatgcggaatacactgcttcttcttcccggttctccataccggacaatcgcacgttctacttctcgtatggagacaccatcaccaagttcacaaagcttgcaattatcttcgcaaggtgccgtacatccatcacagagaatcattggaaatggtgtaattttctcataaattgccaacgctttcttaaaatttccttttgcagcataatacagcatctcttttgtatccattttgaaaggacaggctgcaacacagtaggccggctgttcatggacgcagagactgatcatatgatccatctcttcttttgacattcgatttacatgataaacgtgagtagaacctctctcctgtatgtatgtcataacctgatactcctttcgtctgtaaaggggaggcagtttcccgtctcccctgattatatcacagttggcagcttttactccaaccacattatgaattaagcttatttctcaagttcttttaatgctgcaagaaccctttccggacgggcagggatacgtgtaatacgtgcacctgtcgcattaaagattgcattcaggattgcaggatgtggagcatccagtggagcctcaccacaaccagccgcaccgtaaggaccacttggacgatatgtttcattgaagtgaagttcaatatcatccggagcatcctttggatatggaataccacaattcttcaaagtggtgtcatggttcaaatcttcaaaatcttccgaaagagcaagaccgataccctgtacaagaccaccatagaaattaccttctacaagaagtctgttcatgatcgtacctacgtcagctacgcaagtaaatttctcaacggtaactttacctgtttctgtattaacagcaacttccggcaggaagatagtatacatataagttgcaaatggatcgccctgtgcggtatcctgatcgatcggatgatctgcacagaatgtagttacccagttaccttcatattttgttgcaagcccttctgctaccatctcatcataagtacggaatgttccgtcttctttcttcattgctgctacaagattttctgcagccagacgacatgcattacctgacataacctgtgagcgtgatcctcctgcaggtcctgcattcggacatgtcttcgtatcattcataaccagtttaatctgttccggtctgattcctgcctgacgcagtgtttcatgagatgatacaagaacacccatatcagccccctgtccatgatcttcccatgcagcatacatcgtaacggttccatccggatttaattctgcaaatgcatttgatgtatcaacaccatcaagaccacaaccgtatactccaagagatacaccgataccatatttcatctttccgtcagaagctgcattcttttcggcaacacgttttttcgccgcttcatacaatggacgtgctttcttaaacaaatcttcctcacaatatacctccggtggataacctgtcgggatggtagtgccctctgattctttatagcagttcatttcacggatatcaaacggatcgattcccatcttagctgccagcacgtcaattgcaatctcagatcccatataagactgtggtgaaccataagcacggaatgcggagccccatgcatggtttgtaaatacggttgttgatttattacgaatagaattaattccataacctgcgcctgtaaactgagaaagtctcatggtaagcagatcgccaaattctgaatatggaccgtgatctacatagttgttaccccaaagtgctaagagtttaccattttcatctgctgcaagcttaatattcataaatgcaggagatctctttcctgtataagtaatgttctggaactgattaaataccagcgataccggacgttccagaatcttaacagctgcaccaatcagagcctcatttgtcggtgagaacttgtaaccaaatgttccgcctgcatggttctgaacaagtcttaagttttccattggtacaccgataccatctgcgatcataggcatatgaagatgtataccgatagatttggaatgcactgttatcataccgtcttcatcaatatatccataaccacagtccggctcaaggtgaagatgaggctggcgtgaacagtaggactcgatctcaacctgctgtgaatccggaatgctgtcccagtcaaagtccggtcccttgatacagtttgtctcaaaaaatgcgtttggagtaccaggatggatctctgctgcatccggcgcgattgcatccattgcgttcatatatgcaggaagttcttcgatctccaccttaactgcatctgctgctgcacgtgcatgctcttctgtgtcggcagctacgatcgcaatcgcatcaccaaactgaaagatcttttcgtcgcagagtacaggacgctcaaatccgtctgtcttattgtgtttcggaagcattacaagaccattgatcttgttggttccgcctgctgccttaatgtccttcgctgtaataacacgaacaactcccggcatactctctgcttctgttgtatcgatactgagaatatttgcgtgagaaaccttggcctgtgtaagtgcaagacgaagagttccctccggcatctttaatgcatcatctgcaccgaaatcccaggtacctgttaccttctgtgctgctgatggacggatatagtttgtaccgacgatagaatcacctgtctgcttgaatacgaggtcttctttagtcatctcgccacgcataactgctgctgccgccatggtcgcatcgataagcggcttgtaacctgtacaacgacagagattacgctgcttgttaaaccagtccctcacttcttcacgggtagggctcggattattatcgagaagaacctttgctgaaataataaaacctggtgaacagaaaccacactgtgcacatccatatgccatccatgcaacctgtatcggatgcatatcagaaattgttcccacaccctcgattgttgtgatctctgcattgtccggaacacggctcatcttgtaaatacaggatcttgtaacttttccgttcataataacattacatgctccgcaatgaccttctccacaaccgatcttacatcctgtaagaagaagatgctcacgaagtacctgagccagtgtctcatccttatcaagaataaggattcgctccacaccattgatcttcaatgtctttttaatcatgtttcattcctcctttaaaaaatacacgttccgatgttacaaatcttctgacttatgtgttccgcatggatcatgatcgactcccttacccgtcagatctttaagtctttccattcctctgacagaatagaaaacaatggaagagctgcttccgtccagattctcaccgctgagttttaaaacattcgcattctcataataatcaatcggaagtgtccgactgtattgctctcctgtgcgctcatcttttacctgtatcgtaacttcttttgcggtaatttcaaaaatcttatccatggaaacgttctcctgtttacattattttgtataatttcatgttatcataattttgtacagttttacaaattgtaaataattattagttggctattttcgctcttttttatattgtttttattactttatttaaaaattttactatttatcctcactttttatgctataataatgtcaaatttgtacaatgttgtttttaggaggtatctatgatgcagacaggtgctctcatcgtagctgcagggaaatcgtcacgaatgggagacttcaagcccatgcttcagcttggatccatttccatcgcgcagcgtgtgattaataacttccggcaggccggaatctctaaaatagtggtggtaaccggatacaatgcggatgctctggaacgccaccttgcttccaatcatgttatttttcttcgaaatgaggactatgaaactactcatatgtttgattctgtcaggattggactggaatatttaaaagacaaagtggatacggtactctttacacctgtagatgttccactattcacagcacataccgttacacaaatgctttctctcggacagcctcttgtcactccggtctgtaacggaactccaggtcatccgatcctgattcgttcctcattaattgagtccattttaagcaatgatggaaacactggtctgaagggtgctgtagaacattgtggaactcccatgtattgtttaaatgtagaagatcctggaatcattcatgatgcggatacaccagaggattatgtagaacttcttcgtgcacacaatcaaagtctgatccgttcagagattcagattcagctggcacgggaaaaggtcttctttgatgaacagctttattcgctgcttacactgattcatgaaacaggatctgttcgtgatgcctgcgaacgcatgcacatttcctactccaccagctggaatctgatccatacattagaatctcagcttcatgaaccgctgattattcgaagtcagggcggtgtaaagggcagtcacagtgagctgacaccatacggagaagaatttttgaagcgatatgcccgtttttcagaggaaacacgtacctgttccgaagcaatatttgaaaagtgtttcagaggatttttcaatgcgtaatctttatcttattcgacacggaaaaccacaatatccagatgaacattcttactgtatcggtcagactgatttttctttatctatgcttggacatctgcagtcagtccttcttcacggagaactggatgataaaataactgctgtttactgcagtcctttgtcaagagctatggaaacggctgcacatatcacacctgatcttccacatatcactatctcagatttaacagaacgaaatctgggagaatgggatggtctttcatttgatgagatacgcaaaagatggccggacatatatgaagcacgtggaatgaatcctgattacccgattccaggagcagaaactcctttcgcatctggcatgcgtttttcgcaggcaatttatgagattcttcgttcttctgagggtgatattgcgattgttgctcatacagatgtaatttcttcttatctgtatttgcttgattcaaaacagcatgccagacagtattttcgtcttccatgtggttcctattatcatctgaacgcagacgataacgatcatgttgccttatctgattcgacttacctgctgcctcatcctgacttgcatgacgaactatgccggatgcttcgcgatgcggtgtctcttcctcatcatgtacaggcgcacagtgatgcagtgactgaattggcttgccatttctgcgatctgctggaatctcatggttacttttttaataaaaaactgattcgctccggagcactccttcacgatattgccagacttcaaaaacatcacaccaaaacaggtggtgatcttttcttacaattaggctatactgaaatcagtcagattatttcacaacatcatggtttacagaagacaattctgaatgaagcggctatcgtctttttatcagataaactgattcaggaaaccgaacgtgtaaccatcgaaaaacgatttgcggaaagtctgtgtaaatgtaacagtcccgaagctttgaaatctcatgaacgacagcttaaacaggctcttgatctgcaaaatatgatacagaccatctgtcacatgacgatatgacttatagaaaattacaggaggtgttttatatatgagaactttatttcagatcatacaacaagaatttcaaaaaggaaacgaccttgtgcttgcatccatcgttgcttcctcaggatcaacgccaagaggtgccggttcccgtatgttggttggaaaaaaaggccgaattgccggaaccataggcggaggttctgtcgaatatcgtgcagagcttatggcacttgatattcttgaaaagaaagaatcctgtgaacatgaattccggttgaatcgcaaagatgttgaaaatatcggtatgatttgtggtggtgatgttaccgcatttttccagtatctggatcataatgaccctattattatggaacttgccgtaactgctgagacattatataaagaacgaaaagatttctggctgatctgtgatcttcatgctacatccggtatgagtctttacagtgcatcctatggattgactggaaatgctgatgttccttcttccatcttatcttccttatctgcaagaccatgccgtcatcgcaatgaaacctgtgacctgtttacagaacaaatcggtacatccggaactgtctatgtatttggaggcgggcatgtttcacaaaagctggtaccaatacttgcaagtgttgactttcactgcatcgttctggatgaccgtccggaatttacagatcctgctcttttcccggatgcagcagagacaatcctttgcgattttgatcatctggatcagagcatttctatcacagatgctgattattgctgtgtcatgacacgaggtcatgcctatgatacgattgtgcaggcacaacttcttgccacacctgcatgctatatcggcgtcattggaagtcttgccaaaagagctggtgtatttcatcgtctcgtagaagagtatggaatcgatgagcgagaattagaccgtattatcacgcctgtgggacttaatattaaagcagaaacacctgctgaaatcgcaatatctatcacaggacaaatgattcaggttcgagctgaaagaaaggctgctatgaaatgatgacaaaacatgtctacaaaactattatattcggtgccggacaaattgggcagatgactgcccgacttcttggaaattcctatcagatcatgtgctttgccgataatgatccgcgcaaacatggacaatttattggtaatatcccaatctgttctccatcaaaggccgctgctcttcttcctgatctgattattcttggtgtattggatgaagagcggcgtagttctatgatgcagcagatggagcacttgggctatcacggttcattttgtgatccttctgcacttcgcatgttcgatgcacgggttgcggttatgcgccttttagccgaacagatgcatcaacaaaatatccctggagatgtggcagaacttggtgttttccagggtgatttttcttgcctgatcagtacagcctttccagatcgaaaaatacatctttttgatacttttgaaggcttttcagaaaaagatattgccgtagaaacctccaggcatctgtctcgcgctaaaacaggtgacttttcttctacagatgtagattctgttcttcgcatcatgcctgatccatcacatgtgatcatccataaaggatggtttccggatactttttccgatattaccgatgaaactttctgtttcgtatcattagatgcagatctctatgctccaactgctgctgcattacctctattttatgaacgtctgtctatcggcggagttctcctgatccatgacgtatacagtacccagttttccggatgtaacaaagctgtagacgaattctgcctgaaacaccacctgtttgcagatcctgtatgcgatctgcatggaagtgctattatccgaaaaatcatttaaaacctaatcggaagcctttcataatcctatacgccttctgtattatgctattttacgagataccctccatccaccggaatgattgctccgttgagatagtcggatgcatctgatgccagaaaatctgtgatctctttataaagtctggcatcatataccgctatcagcgattcttcttttccattatgacacagcatagtcaccggttggtcggctttttccattgcgaacttcaacagattttgaagttcttccacaggtaccagcggcgtatctacccccagcaccaggcatttttctgtctttgcccttcgaaaacagctctccagaccgccaagtggaccctgaccggaaattcgatccggcacaatctcttcccctcactgtgttccacgatatccagaaattaagatctgttttgctcccaactgacatccttttccgatctgtatctccaaaaatgtctgtccatctaaaagcagatctgacttctcccttcccatatggctgctggcaccacctgccaggactaccagcgtaaaatctgatggcaattgctgttctgccaactgaccgttttctaattcagatatatcagtctgcattttccgattattttctggcacagttcgttgcctccccggtcaggatctgtaatccatgttccagcgctggaataatatattccagactttctctgactgctttcgggcttcccggcagattcacgatcagtgttccttttcgaatacctgctgctgcacgactgagcatagctcttggtgtaatcgtcatactatatgctctcattgcttccggaatccccggcacttcacgttctataatatcctttgttgcctccggcatacagtctctcggcgaaaatccggttccacccgtagttacaatcagctctgctattccctcatctgctatacgagccatctcatctgccagcatctttctgtcatccggcaaaagaatggtatgcaccacttcgtaatcgttcgcttccaaaatttcctggattaccgagccacttttatcttctctctctcctgcatatccagaatcactggatgtgataatcgcagctttcataattccttatcctcctatctgggacattaatttacattcatctgtctcaatctcttccgatgtaaaatgatgactgaccggtttttcccatattactttctgtattgcctctgtcagttcatcagctgtgcatcctgaacgcatcaatttcttcaaatccgttccagtctgatattgcagacaggcttttaaaaatccttctgctgtcatacgcacacgattacactggtcgcaaaacttatgcgtcatcgcactgataaatcctattttaccctgaaattcttctattttataataatgacacggtccattcccatatcgttcttttattggagtcattcttccatatgctttctctaatatttcgcatatttcactttctccccgaaactgaaaatcctttccatatccaatcggcatcatttcaatgaaacgaacatgaatcggatattgctttgcaagtctcgctatcgataccagattttcctgctcttccactaccggcacacaattaatcttcaatccaatctgcggatactgtaatgccgcctggattccatacagcacccgatccagactttctctcctggttacctttgcaaactctgctgcatttaaagtatccagactgatatttatatcatcaagccccgcttctgctagatctgctatctgttcttcgagcaatacaccattggtcgttaatgtcactttttcgatgccaggaagttcttttaacattcgaaccagtgtggcacaattctttctaattaacggttctcctccggtcagtttgatcttacgtatacctaaaccagtcatacatctgctgattctggtaatctcatcataagtcagaatttcttcatgcgagatctgcacaactccattttccggcatacaatagacgcacctgagattacatcgatctgtaatggatatccgcagatagtcaatctctcttccaaatctatccttcatactattctttcgggtttcgatataacccgctttttcctccgcttttttctaccagatgaatgtccgtcagctccatggacttgtcaattgccttacacatgtcataaattgtcaaaagtgccacattcacaccagtaagcgcctccatctccacaccggtctgaccttccgttttggctgtacagattgccgtaatttcaagattttcttcatccagttcaaaatctaccgaacacttctgaatcatcagcggatgacacatcggaatcagatgagatgtctgttttaccgccataatgccagccactcttgctactccaagtacatctccttttttcacagtcccctgtttcactgcatccatcacagcctgacagacacgaatcttgccttttgctactgctgttctggatgtcggtatctttccggacacatccaccataacagcgttacccttctgatcaaaatgattcagcttattctccatctgcctcacctgctgccttctctatcacaatttcatcgccttctgtcaatacgccaccatgaagtactctggtaaagataccttctcttggcataatacagtcacccataattttataaatctcacatccactatgacattttttcccgatctgtgtcacttctaataatacctctccgctgcgaagtctggtgccaaccggcaatgccttcagatcgtatccacttacaatcaggttttctccaaatgctccgtcttcgatcggtgctccctttgccttgaattcttctattttttcataagaaagaagactcacctggcgatgccacttgccggcatgggcgtccttctcgattccaaattcttccatcagtctggcactatgtacattctttttctgtgtacctttcttctcactgatatttaccgccataatctttcccattttatttcctccttcatccctcaattcactctttcgaaataaagagatgtccattatactagatctagtataacacatagtaaacatgataaaagaattgttttttcaattggagaaattatgtatattaacgaacatatgatggatgtctatataaatgatcatctgactatgaaacttgtttgcctgccccagcatctgactgaactggttcttggaagattactgacagaacaaatcatcacgtcttccgaagatgtagatcatatctatatctgtgaatatggaaaacgtgcaaaagtctatttaaaaaattcggcacgcagcacacaatcctcatcggatgcctttgtagaagtaactcctacctgctgtaccggcaatcatattttaaatgattactttgttacatccaaagagccgcagtcacttacaccgattttctggaaaccagaatggatctttcatatggcggatgcctttgcggatggttctcctctccatggcattacctttgccacacatagctgcattctcgctcaaaaagatcacattctgttttcctgcgaagatatcggacggcacaatgctttggataaagtgatcggctacgctctgcggcacaatattgacctgcatcaatgtatggtatattccagcggcagaatacctactgatatgactttaaaggtcatccatgcagggattccaattctctccagcaaggcttctcctacttctgaagcaattgatcttgcaaaaaaatatcacctgaccctgatctgtgcagccagaagggatcgaatgaaagtatttacgaaataatgtttgacaaccacatattaaaccaccggaactggatattgaaagctttttcgcatttttcacgaaagaatcaccgtatcatagattacctcaaccttgatacggtgattctttcatttatcttaataacatcacatctttttcatctatcccaatccatatcttatttccagaaatatgcttttggcactgctgccattgttctttcgtcacatctacgcgaatcctggcttcttctttcgtagatacgatcaagatatacgaaaacacgtcctcaatcactctttccactttacatggaaatacgtttttcgttgtgccatctgcttccggtagtaccggatgtataaagtgacttcgcactcctacactgctggcgtcttcttttcctgtggtatcacactgcaatgtaattccccagtccagagccatgacttcgcctgctgctgtcaccgcctgcgggcgatcctctatggctgccacttccaccagttctgcaccaaattctttcatgcgagccgccagaagtccctgattacaatcataaatcttccccggaatcaatctttttccgggtgccattacttcatctccggtagtcagaacagctactcttacccgacgataaaccttcacttttatgactcccatactggccagtatacctgcttcaataaatccgattttgtcaccctttttcaaaagaaccgttccatttttaaaattctctccctgataacagtaattctgccactgtccggtcggacggaagattctgacagtctcttctccataatctgtatcctcctgacggacacagcagtcacagcctttcggaatagctgcgcctatcataatccgaaccgcctgccccttttccactgtgactctggaatactgtcccgcatcaatctcttccaataccgtcaactgtaccggatgactttctgatgcatccgttatatcctccgctttgcaggcataaccatccacaggtgatctgtcaaacggtgggttatcaaatcctgcaatcatatcctttgccaacactcttccacatgtctgcaaaagtggtacagtttccgtttcctctattacttttgtatgttccagcagtgcttccagtgcctactctaccgtaagcttttccatgcttattcctcctgtcctgctcttatacgccctttccaaagctgcagttcggataatgacattctttgcagccaagacagaatccgccatttcccatatgtgccagatctttttttgtcacttctatacctgcgataatacgtggcagaacaagatcaaatacggtggcttttgcatacatcacacatcccggcagtcccattaccggtgtgccatcttccagataggataacaggaacatcgctcccggaagtaccggagcaccataagatacgattctcgctcctgtatttttgatcgcgcccggtgtcttatcatctggatccacgctcataccaccggtacagacaatcagatctgccccttcttcttttaatttcataatagcggcagtgattttttccatatcatcattgcacagaatatgtccgtgaatttcagcaccgtaagatttcattttttcgatgattaccggtgtgaaagtatccttaattcttccataaaatacttcatttccggtggttacaattcctaccttccgtttcttataaggtgccagcgataccagcggtttttctcctgctgttttcttcaccaaatccattttttcttttgcaatcaccagcggaatcacacgggttcctaaaagacggtcacctttttttaccgggaaatttgtatgacgggtggcaatcataatctcatcgatctcattaatagcatccagcctcggcacatccacctgaaatactccgtcacaatctgcaatcaactcaatttttccttcttttacatccgttggatgcatattctcattgatgcacacatcacacagaatctgcgctgcttcattttcatgcaaagtattttcatccttctcccacacataaagatggtcttttcccagagatagcaaaaccggaatatcttcttcctgtacaatatgtcctttacgaaaggctgtatcttttaccacatccttcacaattctggtaatatcatggcacagtacatgtcctaccgcgtccgttgttttaatacacttcatgacgttccccttttactttctgtccagaaaagttataaatttatatggagtaattgtaacatattgccaagaaaaacacaactttcataaacacgggagtttgacacattgaaatccaaaaaattaccgcaaagccttgaacacgggatgtaattattcttctacagcgaataaatatggttgctcctacggacaagtttatgcatgggttagaaaatataaagataaaggaatcgaaggattatatgatcgacgaggtaagaacaaagcgatttctcaattatcagatattgagaagttgaaagctgaaaaccgactactaaaagctcaaacacagcagcaacaaatggagattgatttcttaaaaaactcgacgaaatagagaggaggtgaacctgaccaagacacgcaatacaacaaaataccttgcaatcaaagaattatagattatttctggctttccatactggcagtcataattgttatctccataatcatcgcatatatcatagtatgaacaggatctttttataatgatttattttctatgtgaactactcggcaactgagttaccagagcatctgaattaaggcgggataccgccttttcagggtgcgtccatgacaccactactgtttgctctttagagctatacagctacttttattatttctggcgtttttagtccggttacggacagttcctttttctctccggatacggagagatattttctcaggatgttatatgcacctacagcatctgcgttatacttccggtttctgtccctgtacagtcccctttgttttcggttgcatggctgtgcatatcttttttccacctctggtgacagcggactgcactggctggtatagctttcttcctgtcttacaaaacggatcccgtacatcttaagcttatattccatcatgctatagagcctgttatacggcagattgtggaacttctggtttgttctgtgtcccaggtcttttcctttccggatattccggatatcccctgccacaacacaggtaattccctgttcacggcagtattttgcaaagtatcttgtgatcttgtgcagataatccgttaccgagttctgctttttctgatataatctgcgaatatgttttgatgtgactggatgttttatttccttcacagactgctgtccataccattgtgcctgcacccttgcaatctctttatgaaaatatctttccaatgcaagatatcttctgcccaggataaatgtattcccattcccggaatcatagcatgtcataagattatgaagtcccagatcaactgacagatagtgtccattctgcgaaagttcttccctctctgaaatctcataaacaacaataactttacattcacctttttccggtgggtagatccgcaactgtttgatctgatccatgcccctgaaaatcttattttcaagataaagaaagttctcatggatctgatacgtttcttccatatatctttttaatgcttttggaagggacagacggactttttctgtgtcccattcatgtacaattcccatctgcatataggtaatggggatactttcctgtttaaaccgcggtggtctgggattctcaatccctccggatcttttcaaggcgtaaaaagatttccatgctttatccagcagcttgcagacttcctgggctgtctgagatggaagctgtttataccacagatcctctctatgggattttttctgataataccagtccgggtatttctccattcccatttctttgtaatgctgacgttcgtaattacagacattccagagcttggatgccgcataacacatatgtccgatgacgtttgcatattcctgactgacctttatggatgttttctttgacagcagcatttcccacctctatgatctcaataaactttactctgatgctcaatatatctgcggatgttttcttccgacacagacccgaccgtttccacataataggaatggttccacagctctcctttccaaagctgttctcttatttccggaaaacgttcgaataatttcctgccggtgatccctttcagatatttcacgatcgcagttatggataatttgggaggagcagacacaaaacagtgcacatggtctccttccccgcattcaaacaaatggacggtaaaacctttatccgctgcgatctcctgcaccagctcctgaagatatgcttcaatctccgcattcaatatcttccgccagtatttcactgaccataccatatggtaattaatattgcacacacaagtgcggtaatgtataagattctccttcatacatatagtatagcatagtattaagaatatcacaataaaatgccgaacatattttcttttttaataaagctggatacagcattttttagtaaaaaaataaatatattttacttataatgtgcagatatgcacagtttacgctttcatctcggcaattgaattaccgaggattcccgcttatcttcctaaatatttttctagtcattgtaatataaaattgcttatacagtctcttccttaagagtcctggtattctggataatatacagagcgaccgatatgaccatcattatagcgcacaaaccaatcaacagatctgataccatcggtgtaatgtggaaccatataatatgcaccgctgcagttccatataataaaaaggttactatctttccatgccagtctgcaccatgtacttttcctgtctttcgtatcacaagacatccactgactaccatatacagctccttacctgccattattacgattaaaagaagcacatgcggaaaacgagtaaacagacagattaacatcgctgcctgtgtcagcttatcagccaccggatcaagtatttttcctaaattactaatcctatggaatcttcttgcgatatatccatcagcaagatccgtaagcccagacagcaataagatttcaccagctaacagaggatttttctttacacaataactccatataattaccggaatcagacaaagccgaaaaaaagaaagaagattaggaaccgtaataattctattcaaattttcttcctgattcacttcactctgcatgtacggtcacctcactttcctttttttagacataaaccaataaaatataacacaaaatgctaaagcaaacacaacaccaaaaacattttgaatcactctaagactaaccgctccttgtagtccataagtctctgcagcaatggctaaagcaccaaatgtgttaaatactgcctgccagccatattgtgctgaaaatcctacaccgattccaccaagaattcctatatatgcatagattgacgaaggaagcagaaaatataatactgtaaaacatataacacctgcaatatttccgacaatccttttacggactctgtagtgcatatcttccataaacggcaaaatcgcggacatggccgcaataccagcccacattgcacgtggcatattacaaatttctgcaatgcaaaggacaatcggtacgcataaaatctgacatatctgccattttgttctggaagaagtgatatcaaattcttgtatcagatctttcagatttcttttataagttctgtttttatgatttcgataaaatacgaagcaggtaagtgctgcacctaaagccatcccgactaatcgcatctgatagctttttcccgtaacatcataaccatatagcagcagatacccaagaaccaatgtagattgattaaacatgaatggattatggcatccgaacagaatcaacacagccagtgccgcaatatttaacagcattcccaataccggtgaaaactgatttgctaaatgcggacatacagtcataattacaaagaacaaagccaaaagcatcgtagattgtccggtgtggatccccagatccgcatttctaaacaccatgagacataataagactactacacctacaatgctgttctcatttccaaataggatgctgaaaatactaacaaagaaaaaacaaaatgccattgtaacagctatcttcaccagatatacccacatatgatataatttttcttttagtgtttcactctttttcaacaggtttttagaacctgcctgatttaactgcaactcctgataaaatgtcatataactcctcccatcttctaatttatcttaaaactatataatctcatctttctgctttggcagctctataacaaatctgcatccaccatattcacggttttctgctttgattgttcctccggcactatctacaatccgttttacaagtgcaagacctaggccatttccttctgctttatgagatccatctacctgatagaacttgtcaaatattctggattttacatcatcctctattcctggtccttcatcttccagaatgaacttaacagaatcctgttcttgtttcagaaacatcgtaattgtcccctttgaagggctgaacttaatcgcattatccaaaagatttatccagatatgcataaaaagtccttcattcccagtatatttaacttcctccaattctacctgaaaaccaatttctttttctgtccattttgtttccaatgaaagaaatgcctggcggatctgttcatccagacgatattctgtttttttcattggtatattctgattctctaacttggataacagcaaaatatttccaaccaatccggaaagcctttgggtattaaacaggattttttctacatattcctcttgctcctgagacaattcttctccctgaagaagcattgtatacccttcaatggcattgatcggggtcttaaactcatgagaaacattggagacaaaatccatctgcagtacttctgttgcacgaagctcttttgtcatcacattaaaactctggtaagattctccaacttctgcgatacggctgttcgtttccaagtgctgttcaaaatctccctgcgaaacttccttcattgctttactgagtctggtaattggttccagcaaccttgcattgataaaggaagtaatcagccctgcaatcaatgtattgaaaatcaaaagccagccaagcacaggtatgctgccaggcagattaaaaaaatgattcaaaaaagcaaataataacgcagatatgactgttgaaaatacaagtgccagccagattgcaccagtcagacaggatcggatccgcaatcctttttctttcttttgttccattattttttcaccaccttgtatccaattccacgcattgttacgatttcaaaatccgggttatctttaaaacgctctctgattcttcctatatgtacctctattgtatgtgggtctgcctccgtctcgtatccccatacttcatccatcaactgttgttttgtaaatgttctgcctggcgaagctgcaagcttatataaaagcaggaattcttttttaggcaaaacaagactttccttatcagttgtaatcgtcattgcatcataatcaaactctgttgaaccgatcacaattttgtgttcattcagtatctgtgcacggcgaagcagtgctccgactcttaaaaccatttcattcacatttaccggttttaccatataatcgtcacttcccgaaagaaatccctggcgcatatcatcaaaggaacctttcgcagtgatcataagtaccggtatctgatatcctgctgaacggagttccgacaccagttcataaccatccataaccggcatcataatatcggaaatgatcagatcaatatactctttatccaatatttctaatgccagtgctccatccgatgcacttttgacctgatatccattcttctcaagcactttttggaatagctggcttaattctttatcatcttctacaattaatatttgaaacacgatcttcttcctcctttatcagaacagatatcttgcccatccaagcagatgctgtaccaaaagtacgtttctctgacgcttctttgtcaattcaattggctctacatgatacggatcacgatagattccatcttctaatacctgtcgggacactctttcatattccatcatgccttcttccaactgtttattaatctctttgctacgtattacaagcatcagttccgtatccagatacgtgcttctcatatccatgttaaaggaaccgattacggatagatcatcatcaatcaggatgctttttccgtggtaagaatagccgccttcatactcccagatattaattcctgtacttaagattctgtttctgtttctcgcataatcagcagaaccaaacggatttccattgttggcaaccgaattggtcatgatagaaaaatccggaactctctccgcaatctctttccatgtattatacatcatatcattacagacaatatatggcgtgtggatcttcacacgattttttgcatttttcatcaattctcccaactgataccacactactggttctttggaacctgtgtgaataggatttgacactaatgtaatcttttctgtctcaaaagtttcgtccgtataattggtctcgcagattctttccttattctcttcaaaatatttctgatagctgttctgcagctctaaaactgcgttctttacagattttctatttgccagttttttattgttatgaaaataaccactgtcttcctgattccatatggtttcaaaatactctgacaactggttaactgaattttctttctcaggttcatcgcaaaccactaacacgtctctgtcatagttcttatgtcccggaaaatcacccaggaaataattgtatgtatttcttcccccaagaatatatctctttccatctgcaatcaaatatttatcatgcattctacccatcattttccacggtttcaacggattggccttattatacagtttaatttcaacattctcatgggaagataatccatagaaatacggatttccttccatatcaatccagctctccattccatctactaacagacgaatatgtacacctctgtctgccgcatcatgcagtgctcctaaaatcaattttccactttcatcggattgaaatgcaaaagtagaaagaataatttccttttttgcattcttgatcaaacgcactctttgtaaaagtgcttctggattcttttctatgattactgcccgttctgtattttcactgcattcgttccatgacccattttttgtttcttttttggttgtattggacacttccggctgctttttatatgcaacgcagattccgagcaattcataaaaagccacacataaaaaaattgccagtataacaagaaggattttacatattttatgctttttcattgtacatcacctgattcctttttatttcatacttatacaatacaaagtcaatctcaatttaacctcaacaaggtttgtttttttcatccatgcaaaatcttctttgtacaacagactgttagatatagcaaaaacggcctttcaaaaacagttaacttctaaatcaactgttttttgaaaggtcgtttcatcagattcttatagcaatccagcaaataatctcataaataattgtcccagtcgcaaatatgcacttcgtccggtttgatattggtctgtcacatcacgacattctcccatcgttcttatcagatcattttttatttccacaactgcctgacaatctgccataaaacagccgttttcaaaatggtgatataaacttcgataatccagattaattgttccacaagttgccatacagtcatctgccacactcatttttgcatgacagaaaccaggagtccactcataaacacgaacaccatgtttaactaatccatgataaaaagaacgagttatattataaatgaattttttatcagggataccaggtgtgataattcttacgtctacccctcgcttagcagccagacataacgcatgcgtcatttcatctgttatgattagatatggagtcataaaccaacaatatttttcagctttatttatcatactgatataaacttcttctcctacttgctcattatccatagggctgtctgcataaggttgaacaaacccagtttgctgtgccgcataatcatagtggaaaaggtatttactaaaatcagaatcattagcatccttatcacttactgcattccacatttccaaaaatgtcaccgtaagcgactgaacagcatctccttctaaacgaatacctgtatctttccactgtccatacgggtgtgtgtaattaaaatattcgtttgctagattatatccacctgtaaatccgacttttccatcaataactgttatttttctatgatcacgattgttcaaaaacagatttaaacctggcataaacggattaaatacacggcaatgaattcctattgcctccatctttttcacaaaatctgtgttaataaagcctatagaacccatatcatcgtagaatactctaacttccacacctgcttttactcgctcttccagaacatcttgaatcttatgccatgcttcagcgtcttctatcgcatgatattccataaagataaacttctgtgctttctccaaatccttaagctgtgcctctaatcctttcactgcttcatcaaaatacacaatatccgtattctgatagattggatactgcgaatttctttgtatgtaacttgctatatttcctgctttcggaattgtttcttttattttgctcaaacactcctgaccgtccggaagcattggtaacaatttgctatcaatttctgcatatcgctcacgcattttatgtgtgccaccattcaaaccaatcaacaaatacaggcctacacccataattgggaaaattagaattaagatgacccaaggcattttcatagaggatgtcttatttgatgcgtacaatcccaaaaccaagatcccactcaaaatccttgtaaataaatttatgatttctgcatattcattcaagcgtgttacgatagtaataataaaaatcacttccagaagaatgcagattatggaaaaacacagccgttttaccccattttttgtttttgctttgccctctaaagtatcttgtttcatatatattccaccttcctacttgctcagttttctccctaaatttcgtggaacataccaattttgtcttttattctctgcatttcattatctgcttcaatgatagctcttgcagaatgaagtaattcttcacttatctcatcatagccaggcatttcttcaattccttttttatagcgaagttgatgttccaatgttgcccagaaatccataccattggttcgaatctgtaattctacacgcataggtgttttacccttagcaaaaaatactggtatttcgacaatcatatgatagcttcgataaccattcgattttggattttttatataatcttttatttcaataactttaatatcatcctgttgggtaatcaaatctgatatcatataaatatcgtcaataaacgcacaaactattcgaacgcctgctacatcattgagatatgtctgtatattttctgttgtaaattcatatcccatcttctgcagtttatcgtaaatactattgggcttcttaattcttgtttttataaaagaaataggatttcgattgttctcaactgaaaattcatcatccaaaacctcaagtttagtttgtatctcccgaatagcacaacgatacatcatcattaaattataaaattttgtagcattatttaaaaactgtagtgattccggactgttcatcctgagtttttttacttcatcttttgtcatggaactttcctttctacctcatccctgatttcaaaacattatttattttgatagttgattcgttctccttgaattactggataacaaatcattttatcactatccagattttctacatgcatatctactgcactgatctgatggttttcataagtattgtaataataaataccttttgtaacattacaacacgacgtatacaatgtgatttcatattttccatccgctacttcgcaacatcctcgttgctgatccacagatccgagaatgtggaagaattggctaacgctttcttcctctgattcacctgaaattgcatttacctttgtaaaagctacacgtacaaagcgtgaggcagatgagagatctcccggaagacctaatcctcccatacctctactatatgcatcaagagccaaattttcgcagaaagtatttctgggctgtttaggagataaatgcatataattatttagttgaaacatctgctgtggaaatggcggattattcgtaagcactcctactggattatcataaatatgcaaaccatctgacatagattctaccgtaattgactcattctcatcagaaatgatccagtgtaattgtgctaatggcaattgctcgctgaaaggagtattaacaatattaattcgttcaagaagctcgcgaacttcaactaaagaagaacactgacttaaaatccacggaataaattcaaactgtgcaatattttccacatctggcttaatcgcggaataaacagcatttccgacaaaattcagtcctgccattgccactcctttttcattcatagcatcataatacaaaggataatcctctgcaacatgagccattccaataattgcataatgatttttcatatcgtcaacatggcgaaaattaaacgcataattacgtggtgtaattactatctgatcaccataagagaattcataatcgagggttcgtccaaagtaaaaatcttttgttttataagttgctgctgtacacatgatcgtttatcctcctaaatagattgaaatatgtcaatgagtttttttcttgaacaatagtatagcacaattcttttattttgttccaacttcatacatgatcataacatgtagactttaaactattttcctagattatttctccatcagtttttcaaaccaggtatccatagctaggatgaattgacctacgtctggcaattcttgcagcatttcgtttaaggttttgtgcttcacatatttctgcacatacacccaacaggcaacgctactggcttctgatacaatgtcagctatggttttgcgcataagctcttcaaattcagcaatttcttcttttgggacaacatcatacagtgttggtgcctgatgacttaattttacgccattttcatttgcatctttaagcagattcttaactttttctcttgaattctccggtactttcatgtactcccatataaatgctaccacatcggacggtgtgtcttttttaagtggtggtaactgaatataatcattgttttcgctcattttcatatcctcctcacgatataataaaatcaataatacgttctcttgtcatgtccagtacagtatctacgaacactcctgcaaacaggatcagatacagaataacactcagcgcaaacaggaatacaacctgtacccagtcatggtaacagtatgcagttgctataatcaacaaagtgaatataaaaccaaggattccccttacaaccgcataagtctgtactgtcatcttcactgccaggccgatcacaaaaaggatcagccataccggcagtaataatatctttccagcaagttttaaaataaacatgtgcacctcctatcttaccagtcctggcatatcatggttcacctctgtctgataatacccgttcatcgttgacggtgcattaaacagggctgctaataaatatttcttgatgttcttcacctttgtggtgttaccactcatacagtgtaagacatactcgatatgtgaataggtcagcatcagaaattttttcttcaccagtgatgccggataccagttgctggcaatcaagatcttgtcatttttacacatcacagtctctacgatcaggttcacgatttcatctacctgtcgcatatcgtcatgatgggttacttccagtgattcataatcaatggtctctttgacaaggttttcataagcctgataatcctcagagcgattatcgctatcaaatcttttctcatccacagatatgataggattagatttattatcattcatttcagtatcactaagattagtattattagggtttgaaatgtaaacttcttgaagtttgtttttgggacttcatgaagtttgaattgtaaacttctgtagattcctcattttccacagaagtttgttttttaaacttctttaattcctctccaaattttttcttatctgttttctcaggcataaaggttttcacgtagataacgttcacctttccaaatccctgtctgcgtttctcaatcagaccaattcctgtttcgtcatccagttctctgacatttctttgtcctcttttctttgaattatgaaagaaaaattatcccttcatataacgaaacgctcagagcctgttttacagtggtcaaaagcaaatttttttactttttttcttacgagttttcttgcgagtttttttaatgccactcgtaagaaactcgtaacattagatttctgcattttcttgaaattaagtaaaagaaaaagagcatatggaattgaatccatacactctatgattactgaaactttatttcatttttaattcaacaaactgggatttatataattattcctctaactttccccattttacaggcttttccgcctgtccattagtgaaatgatatgtagtttcccttatttttgcccttatgagataatcacaagggaaataagggaatttttttagtcattacctaccactttatcaagaagccgaaccgattttcgtttcgcatctcttgtggagtgagcatagacattcattgtggtactgacatctgagtgtcccaacaattcctgtacatcttttggggctgctccatttgctaaaaggttgcttgtataggtgtgacgtaactggtggaaatgaaagccttcaaatccctctaatgcttttgccacctttctgcataccgtccccaaagtagtcggaagttccagacaaccatccggtcttaagcagacaaaagaaatttctttataatctgccgggacttcctgcgttctgtctaagcaataatattcgtagtacactctgtttttctctttgacctctttgtagtagttcgtgtgataaagttctccgtactgcattcgattttttaactgctctttccgggcattacggaaaatctctaccagtgtatctccaaaatcaacaacccttacttttttccgcttggttggtccgatgatatatttgcgctttgagccatcatatcggatgctgcgtcttatggtaaggcattgttcttccagatttacgtcctgccatgccaaaccacaggcttctccaatacgaagcccggcataataggctatctggattggaagtattgcggctgggttctttttttgcagataagcaagcagtctttcataatcttctcgtgaaattggttggacatttccgtccatatcctcatcagaaaacaaatccacttcatccgtctgataccgcagtttaatatactgcataggattgaacgtaatatactgctttggaaatactgcaaagcggaatgattgctgcatgactgcggaaaaagaatggatgtaatctttgctgtaaccctttctctcttttccatcgggatgaactcccccgaaggaaagcaaatcgaagaaagattgcaaatgttcagaggttacatttttcagtttacgttctgccaatgggtgtttcttaatatttcggattgttccgaggtaattctccaccgtaccattgctgagcgtacctgtttttaattcctcctctgcccacacatccaaaagctgtccgactgtgagattatccgctttggcaacaaatttctttttctcataatcatccattgcctgacggagcagtttttcagtttcacttttgctttctgttccaacgcattctttctgaacaagattgccgcttgcgtcctctacatagaagcggtagtaccatttctttcctttttttcttacagatccttttgccataatcgtatgtctcctttcgatattagacaatcggaactgatgaaatgcttcgtgcgtgtaagtatatcataactccggttgtcttactataccgattcggaatcttcgtataagacttctgataaaagatttgcaagcctttgttctgctgtttttggtttcttggaatagagccttacaatgtctgccatctcattaaaagcattgatggtatgagtgatttcccttaagaacataatctcattatattcctcattcgattcaaaccctattgttttggcaatatccgtctgaccagcatttcccttgaagtttttgcaggcgaactggaaggaatccaaaaacagaccatattgttttaacatcagcagtaataaatcttttgaaaaagcatcttcttctttggtaagggcaagcggtaactgttccagaatatctcccatcgcatcacgaatctgtaattctctcttatccgtaatgtcggtttcatattcatctgtttcccctttgagccattccacagatacatggagtgcttccgaaagaccttccagcaccatttttttcgtattgtcaatcgaaccattctcataacgcaggattgtagaagcggtaactcccatcttctctgcgacataaggctgtgtcagattcaattccagacggcgctgttttattctgctgcctatcagcttgcgtaattctttatctttcatgctgactgcctcctttttcggtatgtatgaattatagcattgtttttccgaaattgcaatatgcaacttaaaaattatttttaatatttcgtaacgcttgacaaaaagatatgaaaaggatatacttacatcacaagaattgcataatgcaatttataaggaggtgattatatgacgcaaagaaaaattgcattatccatcgaagaagctgctgactatacgggaatcggcagaaacaccttaagacagcttgtagaatggaagaaacttccagtattaaaggttggtcgcaaagtcctgattaaaaccgatattctggaaatgtttatggaagcgaatgaaggtcgtgatttgagggatagaggaaatgtaaaagccgtaacaagaactgcggcaaattaaaaaggcggcttccaaagaaaccgccaaaggttctatcagaccgaagccatgatatacctacacgcaagaagattataccatgtgcttcttctgatacgcaaccgagaacttatgtttgtaaaagaaaggggaatgtaatcatggcaaaatcaacaaaaagttatgaagaacgaatgcttgaaatggaaaagaaggaacaggaaagccttgaaaaagcaaaacgatatgcagcacagaagaaagaacttctgaaacgaaagaaagccgaagaaagtaaaaaacgaacccataggctctgtcaggttggcggtgcggtggaatccgttctcggtgcgcctatcgaggaagaggacatcccaaagctgattggttttctgaaaaagcaggaagccaatgggaaatttttttcaaaggcaatgcagaaagaaacacataccgatatggaggaagtgtaatggcggggggggatgagtttttcattcccttcattgctttttcatgaagggcgcacttatggacaaccagaggtcgtcccaataagtttgccacaagtggcaaccggtcttcgctcacgcttgccgggctcgttccgtcggcggggctttcagccagacctgctcatgccgcaggaggcactcttcgccagaggggcgcattccatgcaggctgctatgcgcagggcactcttacgcagagggcgttccggcaatactgctttttctaaaactgaaagcaatgttgccggaaatctatgccggatgtgcagaaagggggaatccagacatggcgatttttcattacacaatcaaaatagtcggacgaagtaaagggaaatctgttatctccgcttccgcatatctcaatggggatgtgatgaaaaacgaggaaaccgggcgaatcagttattacacttctaaaaaagaagtggtctacaccagtctgatgatgtgcgaaaacgcacctcctgaatggcagatagtaccagaagaaaatataaaacgctttcaaaaatctgtccgatacaaaaggtcagaagataaagaagctgctttagaaaaatttaaaatcacatttcagaaacaacggttatggaatgaggtattgaagattgaaaaaagtgcagatgcccaacttggcaggtcatttgaatttgccctccccaaagaatggagcagacaggaacagattcaatatacagccgactatatcaaaaaaacatttgtggataagggaatgtgtgctgattggagtatccacgacaaaggggatggcaatcctcatgtccatctgcttctgacaatgcgcccttttaacccggatcattcttgggggaagaaagaagtcaaagattgggattttgtcagagataaaagcggaaatatcgtgattgatgaatcccatccgaactggtggcaggataagaaaaaccctgaccgtcatggaatccgtatccctgtattagatgaaaacggaatccagaagattggtgcaagaaaccgcctgcaatggaaacgggtactgaccgatgctacgggatggaacaatccaaaaaactgtgaactgtggcggagcgagtgggcaaaggtgtgtaatgaacatctgcctttgcataatcaggtcgatcaccgttcttacgaaaagcagggaaaactccagattcctaccatccatgaaggtgctgacgcaagaaagattgaacaaaagtttcttgccgggcaggaaataaaaggttcgtggaaagtagcggaaaatcaaatcataaaacaacaaaacacgttattgcaaaagatactaaacacctttgggaaagtatcgggtgcattatcattatggaaggagcgattaaatgacattagaagaaagccgggaaattatacccttaatggaatccatgattggtcaaatcgaagaacagcagaacctaatggcagaaatgattctggaaatgcagaaccgggacactcaactctctcttatgcaaaaacagaatcagaaattacaaaaattaaacaacgagttatccgagctgctcaacattttgccaaataccgaggaactgctttccaagatggaagaacagaaaacgaagatagagcttttggaaaacgaaaatcagcaatggcagaaattggcacagaagctgaacaccgaaaacagtttattactgaaacagaacaccgaattgctgaactggaacagcagatagagaaaggacgtgatatagatgaacgaatccagagaatcaaagaacgccgaacagttggaagaacttctgctcttgaccgaggagatacaggcagaactggaacagaaagaccagcttatcgtggaactgaagacgcagctcaacgaatctctgaccttgaacgagaaattaaacaaagagaacagagcattgaatattcaatcattaaagaacgacttgaagatggcagacaaagcattgcggatcgagaaagaaaagctgcgaagcgcaaacgtcacgatagaggattgtcaagataaaatacgctgcttaacacaggaacgggattatgcccggacacatcagaaaatcgtagagataccggtagaaaagccggtactctatgaaaaatgtgaagcccgtgaccgggcagcctatcagaatgcaaaaacgaaatacgaaacacaaaaagagcgacttgccggacagtataaagcaaaaacggtaatgttccaaacaaccttgtttcttcttgcatggtattcgctgatatccactctttttcaggcaatacagtcagatgtgtttctttccgattgtaaatcattcttcaatgatttagcatcattcatacaaacctttgtcggatggacgattgatgccgggcattctgcggcacagattagtacaaaaattccaaatgcttttatagccggaatggtatattggttattgctaatattgattgtaggaatatgtatggcaggaacagggatgctggcgatactgatagaaataaaggttatagaattatataagaaaaactgttgggatgttattactctactaatgatactgacaagtgttgctattgtcatttattttggagaatcaatcaaaaaagtactgtcagtaaatcttctattgcttttcgtactttcgcagggcgcatatgttggaattagatgttatcttaaagtttggttagaaaaaagaccatattagtattttcaacttactgtatagacagtaaaattactccatactagcctagtgaaaatttactgtatgaaaagaagtattacagagaaaaaaggctgtaaaaacaggaacagccagcccgaaagaatttacggactggctgtatcagcagagtaatgtaattgttgagctgaccgagatatgaaaaactttctatcgtcaatttcgcattattgcaataacagattgcttcttccatgaatgaataagcaatattgtcatcaaactttcaagcataaacatagcaacagcaaaaagagtaaaagcaacaaccggaaatacaaatcccgtagacatgcctgcatttttcaaaaatataccgattgcatatccgccggggattccaacaacagcagttataagcaatgcaatcaaagtagtaaaaagaccttccatcataaatgcttgctccaactgcttatttgtcataccaatagattttagtgtgcccatttcctgtttctgtgataaaagatttgtcacagtaagattgatttgattgatgaccgcaaatatccacaagatggctgcaatcgcataagctaatgtaaaacctgcacgattgtctgattggtgttctacaataaaatcttgaagggtttgtaagcgaacatccctattgtcagaaacgagtaatttgagttcttgctcgattatctcctgatattcagcttctgcttgtatttcgattgcgtatatacagtcataacctgcaagttctttgagcatattttccggcattctgaaaatatagccacccattccatcattgctggaagtgattgcaccaattttgaatgcttttgttattgttttaccactatgatttttgaaattaaaggtcacagtatccccaatttgaggtttccaatggtaaacatcataaatacgttcggggtcacttacaactaattctgtatcatcagtaatatttccagacaaaatagctgcatttagcgatgccaaatccttttcattatagccgagcagcaaggtgctatctgaaatatcattgtctgttgagtaatcaactggtaaggtagcataagtaaatatattgctaactccctccatatctccaacacgctttacataatcagaaaaatattctttctgcaagagagcatccagattttcactttcattttctaaatcaatgctgattttgaaatctccgtacttcatatcccaataacgagccatactctcggcattaaaagaactctgataacttgctgcaaggaaaaatataactccgcacagtcccaatgataaaatggtcaatagagatttttttctgtttctgaaaaagctgattttcgctaaatatacgggcgtaatacgatgtcttttgtgagtgcggtaatttacaattcccacttgatttttcagggcagaaattggagaagtattcgctgcaatttttgctggtttacgaacactaatataaacaagcagtattccaaaaaggcatgcgccacatagagaaacaataaatgcaaatactgaccaaccttttgattgcagacaatagctgatgatcgttcccatgatactaccaattaaaatccccggaactgcaagcatatatccctgtttaagaactattttataaatttgctttttacttgcccctattgttcgaagctgtccgaactcagcaactttttgtccaaccgaaatatagaaaatgctgtaaatcacaagagcggcagctaaaaacaaaatggcagcaactgcaccatataccgcataattactgagggacaaagttgtatttacataatcatagtaactgctgactgtccaattattcagtccagtctcctctgaaatttgagataatatttctgttgcttcatcttttataagggtatctgcattttcaagccaaacatatccattaagcaggtcatttccacgtaattcccggcatttttcaagcgaaacaaaaacaggataagcggtagaagttttatcatggtaaatgccaacaatagtataattcttcaaagtgccatccagattcaactgaactatggcgttgatttccggagacttattttcactggcaaaaaaggcatctgtaacagcaatttcatttgctttctctggatattttccgtcaaaggcaggaatcaaattaagcatgtcatcatcataataaatcaaagacagttctttagaattttctttcactgttttgatattacaagaaagtcctacactttttacttcttcgtttgctaacagcttttctttactgtcccgcgtaatgtcaaagaaaatcccttgatgtaatccttcgatttctttctgattttgataaatgatattttgcaccgtgagcaacgacatcattatcatagcaacggctacaataattgccgaaaggcaaaataagtttttcttcttatcaaaacgcacactttttcgtgctaattttttaattactgcactggtatcattttcaaaaggataattcataattcccacctcctttagcctacaattttaccatcttcaatccgcacaatgcggtctgcgagttgggcgatctcgttgttgtgagtaatcattacaatggtctgattaaattctccgctggtacgcttcaaaagccctaacacatctgcactggtcttgctatcaagatttccggtcggttcatcagcaaggataatcgcaggctttgtaattaaagctcgtgcaatcgctacacgctgctgttgaccccctgaaagattattcggcatattttccagtttatcttctaaagccaacatatacacaacttcgtccataaatttctggtctactgtatcgccatccagttccacaggcaggacgatattttcatatacattcaaaatcggaaccagattataattttggaagataaatccgatgttacgacggcggaaaattgtcaattcatcatcattcttttttgcaagttcttctccccgtacaatcacgctgccggaagtgggggtatcaagtcctcccatcatgtgaagcaatgtagacttgccgctgccggaagttccaactacggcaacaaattctccctgttccacagtaaaatttacaccattaagggcacgagtaatattgggttctgtgccgtaatacttctttaagtcgattgtttgtaaaatgctcatattcaaatgctcctttcaaggctttctatctgttgataaagccattgtaaaccacaaatgttacacaaatgtccgagatagaaaaaaattttatcgaaaatcagggtgaaatgttacaacgctcggacatttcaaaaaaagtggttatatcttaccttacaggaagcataatagaaaattctgagccttgccccagctctgaaacgaccttgatatagcccccttgccttgttacaatctcacgagccaaatacaaacctattcccacaccctgttgatcgtgtacttcttcctcacgatagaagcgccggaagatggcagcctgattgctttctgaaatgcccttgccggtgtcggtcactttgacctctacgtacatttcccactgaaccactgatacagaaatctttccacctgacggagtgtattttactgcattgtccagcagattgaaaagggcttcgcttgtccacttgctgtcatgggagattatcaaattttccgggcaatccacggatacagcaatttcttttttctctgcagcatatacaatactgctcatggcttgtgcaagcgtatggaataagctgctgtctttcttttctaatcgtattgctccggtttccaaccgggacgttttaaccagtgcttggaacagaaaatccagtttatcagtctgactacgtatgccttgtaaaaagtccatccgttcttcttctgaaacaggctttgttaaaagtgtgtccgttaccatttgcaaattgctgacaggcgttttaacttgatgtgaaatatcagaaatcagcatttgaagctcctgtcgttccatgtctaccttgtgccggtttttctgcataatctcatacaaccgaattaagcggtggttgatacgggcaaaaagagtttcactatcatttgacttttgtaattcctcgtttccatcaatcatgttgtccagcgtccggcacaaattagaagtaaaatgagaaaggcgttttccaaaaatcagcaccaatagccaaatccagaaaaacgcacagagtgtcaatgttccacccactataaaaattcgtatatcctgcattataccgccgaaaataccggtaattaccagcatagagaaaaccatgccagcactaaccagtctacaaattttcttagcagaaaggttattcagattcatttcttttcgcctcctgtccattgataccccataccataaaccgttttgatatatgtgtcgccatccgcttcaatcttactgcgaatacgactgatagaagtagtaagggtatgttcatctacatatttttcatcaacatcccacagtttttctaaaaattgttggcgagtaagtacctgcttcggatttttaagaaataggttcaacattttatattccatcgcagaaagtgctaatggtttcccgtttaaacttgcagattgttccgaaaaatccagaaacaagctaccatcctcgtaaatatccttagctggtttgtgatgctccaacatagcaaacatggctttgatttttcgctgcaaagcactaatcgaaaaaggtttcgtgatataatccactgcaccagcttcatatccccgtatctgattgctttcctgatcgttggcagttagaaatataactactgtatcaggatgctctggcttgataagacggcataggtcataaccatttccgtctggtaaatttatatccagcaataccaaatcaaaaatgtttgtttttaatgattcagcggctgtccttgcattcagaacagaagttattgtgtaaccgtccaattccaaattataagtaagcgttttattcaaaagattatcatcttcgacaattaaaatatgcttcatattatcacttccttttctttttgcagatagtataacaggcaaatgtccgagaattgttacaaggacaaatatatttttcattttacagcttttttctgtgtactgcaattttataaaagaaaggacagcagtgtcaaattgctgtcctttcttttatcatagctggtagtgtataagcgtgggttcatcatatcgggtgtggtatctttaactataggaaactccctacaacactatctcacttcttgcttaataaagttctaatgaatcttctgcatccacccacatctgtaaattgccatcaagatataatcttgcatattccaaaggctcatccacagctaatgaagtaagcgcacattctgatccatatgtggtttttaaatttttttcagcttcccagcaatcaatgcgaagcatatatccagcacttgtgtaaacatcaatactatcgtggtttatattatattctgcataaattgttctcatcgtatcttatctccattttcttttgataatcagttacagagttaaatatcgaaaacatttcaatcagttcaccatgtcgttattgttatatgttatattgtgttatgaaattttctttcccttaatttttcccatattaaggttcatgaaaagcaatgggaaaatgtaacacaagggaaagagtaagggaaagttcacttgctacaaacttagtattttcaagggtttgcgaagaatttgataatcaaatataacagttattaaatttcctaaaatatgtgaaatatcaactggaagttgactatcaactgataatcaaaaatatcattcctaaaattgcaaatccttcacagatcgcaattatctaaaatctgtcgagctcttcgtatagaaaaacagtaatttcattctttcgaaatttttaattctacgtctccgttactcagcaattctacaacctcacgctctggcatattcatttttcccagtcttacctcttgtttatcatcgttcacggaatccttgttagaactaccacatgcaaccagacaggctgtgaggataatttccagaataactgataaatatttcttcatatggctacacctagttctttattatttcttttcatcaagcaaaataacaccttgtgccggatttttatcaattgcaccaactatctcatgtggaacatatggctcttcaagatatgcaaggtcttcggcagttaatttaatgtcaaatgctccggctgaatcatccagatactgcgttttggttgccccaataataggcgatagaattccctttgcccactgccatgcaatggctatctgggacattttgcagttatacttttcggcaagctccgctacacgtttaactatctgcatgtcttccgcttcagtcttatcatattttcccatggcaaccctatccgtggttccacgaagagactctgatttccactgtggtcttgccagatgtccggctgcaagagggctatacggcattaacgaaactttcatttgcttacaaattggtagcaattctctctcatcctctctgtaaagcaaattataatgattctccatcgcagaaaatggtgtccatccattgtctcttgcggctaactgcatattataaaactgatatccatacatggcagatgcaccaagtgccctgacctttcctgcttttaccagatcgtgcagtgcctccatagtttcttcaattggtgtatcatagtcaaatctatggatgatatataaatcaagatagtcggttccaagacgtgacagagttccatctatttccctcatgattgcctgtcttgataaacgaccttcattaaaatataccttggatgcaatcacaacctgatttctcgctacatttttcttcaatgctttacctaaatattcctcacttgttcctgctgaatatccatttgctgtatcaaaaaagttatatcccaaatcaagtgcatgcttgataacattctcactttcagcttcatccaacgtccagtcatgcatggttccagctttcccaaaactcatacagcccacacataattttgacacttctatatctgtatttccgagtttaccgtattccatagtgctctccttatcttaatccagcgtactctttctccgataccgcctcacaccactcattggaacaatccactcccggcacctcaattgccagatgggaaaaccattcatccggagcggccccatgccagtgctttacatctaccggaatgttaatacagtcacccggtttcatttctaccgcatccctgccttcttcctgataaaaccctcggccggctacacatactaagatctgcccgccaccgctttttgcatgatgaatatgccaattattcctgcatccgggttcaaatgtcacgttgaaaatgccaacctgagaagtggaaatcggtgcaagaaaacttctgccagaaaaatactgtgcaaagccatcatttggtgcaccaattggaaataccatctcttttgcatgcgcccgcattgcttcctcttcgtatggtaaatctccttcacctgcctcccacacttcctttgcaagattgaaaacagcccatgcttttggccatcctgcataaaatgcgacatgtgtgattactgcggcaatctctttttgtgttacaccatgattttttgcattttgaagatgatattttaaagaagaatctgtaattccggaagccatcagagcaaccactgtgatgatacttcttgtttttacgtcgatgtcctggttattccagttttcgccgaaaagtacatcatcgttaaaatgtgcaaattccggtgcgaattcaccaagtgtatttcttcctgctgtctgtactatttttcccattttctgtatacctccatagcactgttatttataaagattttacccactcactgatttcctgttttgttccacggtttaacaggctgccttctgtgataaccgcatccggtgcagatggctgtaattcctttacagtattaccgaatccacttccaccggatgttgcaaagagcacaatctttttgccactgaaatcataggcttccaaaaatgtattgacaattgtcggagctacataccaccagattgggaatcccagaaggatctcatcataaaaactcatatccatctttttcttcataatctccggcctgtatttcttatcactcatttccacactgctgcgggattttttattcatccagtcaagatcatcctttgtatatggaacttttggctcaatctcaaataaatccgcttttgcttcctctgcaatcatttctgctactttttttgttgtcccgcttgcactgaaaaatgcgactaaatttttactcataataaaaatcccctttctttgcgaatttttcgtataaaaatagatgtataagatttgaatttctcttatacatctattttatacctgatatttttattatgtctaatgcttatattgaattccattctatgcctgaaaagcatttatttcttctatcattttactgaccgccagagaatatggaatgtttcgtctccaggcaatcacagtacttgttgtgatttcaggagaaattcttcgctgtacaagaatatcctcccgccaatactttgcagcaccttcgatggataccggatagcccagtccatttgctgccataactccggcattcgttccaagattacttgtaaaagcaatctgcagtttcgaaaagtcttttccaaaccaattggcaagttcactttgaacatttactctttccggcaggatcaatggttttccaataagatcttcttttcttataaactctttttctgccagcggatcatccggccgcattccaacacaccagtgatcgcaatctgtgatccggatataatccagcccttcggtgtccaccggctccatgaataatgcaatatctacaagtcctttgttcatcatctcatacactgcatctgctgttgcagtatgcaatacaatctgaaccagcgggtatttttctttatatgttttacatatctccgccaatgtctccaccgctgcaaattcaccgcatccaatggttatatttccctctacaacatcttcttttcctttcagttcctcaagtgttttttcctcaagattaaggatctccagggcacgcctttttaataaaatcccctcttcagtaagcgaaattttcttcccgcttcgaataaataatgttactccaagctcctcttcaaatgccgccatttgtctggatagcgttggctgggtaatatgcaattgttctgctgcttttgtaaagctctgttcttttgccaccgtcagaaaatagcgcaatagtcttaattccatattttttattcccacaacttccgatttctatttttgtttccatagcatagtgtactctttttcaccagtatcttcatccaaaccttcacattgaataatgaacccttctctttggtaaaaagaaattgctctggcattcttctgatatacatttaatcgtaagctgacttttttatccttaatataatccaataaaagcttacctatgccacatgactgcatttcatcagagacaaaaataccttcgatatattcagcatttagtcctacaaatccttgaatcattttatcatcttcatacacatagacttcggattgtgacatcatttctttcactaattcataattacttttccagtattgattggaaataaaataatgtgctttcagatttgtctttaaccatatgtcagcaactctatcgatatctccgttcagcaactttctaatcataacaaatattctccacaactacatcctttatgcttttctcttttatccattctatcacaagctcaccattaatcatcaattttttgatattttttcttttcccctactgtaaaacagcatctgagcgtttcgttatatagagtggtacaaatatagcgcaaaactaaaatgttagctggaaattgatcattttgaatggaaaatcatgtcacgaacgtgattagaaaaaacaaaagcgttcgttgtcagctaatccagctaacattttcgaacgctttgaagcccgtccataagaggatttgaacctccgacccctcgcttaggaggcgagtgctctatccagctgagctatatggacatatatagttgtgaaacatttcgaacacttccaaaagtttcacaaccattattttactatatttattttgaaattacaagaattaattctaaatttgaaaacttaatagtgcagctgaccctgcagccagattgttcctttgaagcggcgtccaactgccggttcaccgagaagatctttgctgttgatgcagatatcaaactgtatatcattgctctctatagtcatctggcagatttcttcacctgtcaggatattcttaaatttcatgatatccagaatctcaccaagaacattatactgatcacattcaattccataaggcatgaaataagagtccacgatcgtgagaacatcatctgtaacaattctctgggaaatcatggagtaagtatccatatcctccattgtaaggctctccatagcttcctcatcaccattacgcgctgctgcgatcagattagtcctgtttttggaaagttctctctccacctttaccgcttccttatccttctgcagcggaaacaggatctttccctcagaagccagaccggaaaccgtcaccggacggtcccccgggtctttcaggcctttgtatttctcctgcatatattctgccagattctgcagataaaagatcatagtcacgccaatacgcagatcatcacatgctcctgcataagattccttatctgtatgacgttcaacagtcactttttccctggatgtgattcctgttcccctgaaaaatgggaaataatattccacgtgaaactcaccgttctcatcgtactgaccacaaacgctgattccacagtcacagccataattcttggaaaactgtacaaatacgccttccggatgattttccacgcaaaccttttcatcgtagcttgcgatcacatcacggatgatctcttttatttcacttcttctggtaatctgtgaaaaaccaacggtctttaaataactgtgcacaagaacacctccctgaaaaagcctgcgtttctcttacgcgcgtgtctttttctcaatctttgtcataccgcccatatatggctgcagagcttttggaatgtttacagatccatctgcattcaggttattctccaggaaagcaatgagcattctcggaggtgctactactgtattgtttaatgtatgagcaagatatttcttgccatctttgccgtttacacggattttcagacgacgtgcctgtgcatctccaaggttggagcagcttcctacctcaaagtatttcttctgacgtggagaccatgcctcaacatcgagggattttaccttaagatcagcaaggtcaccggagcagcactcaagcgtacgaaccggaatatcaagagaacggaacagatctactgtattctgccacagcttgtcgaaccacatcttactctcctctggcttgcagacaacgatcatctcctgtttctcgaactgatggatacggtaaacacctctctcctcaagtccatgagcacctttctctttacggaagcacggagaatagcttgtaagtgtcttcggaagctcttcctccggaataatctgatcaatgaatttaccgatcatggaatgctcacttgttccgatcaggtaaagatcctcaccttcgatcttgtacatcatagcatccatctccgcaaagctcataacgcctgtaacaacgttgcttctgatcatgaaaggcggtacgcagtaagtaaatccccggttgatcatgaaatctcttgcataggaaattactgcggaatgaaggcgtgcgatatcacccatcagataatagaatccgttaccggcaacacgtcttgcgctgtcaagatcgattccatcaaaattctccatgatatctgtatgataagggacttcaaaatccggaacaaccggctcaccaaatttctcaatctctacgttctggctgtcgtctttaccgatcggtacagaaggatcgatgatgttcgggatcaccatcatatctttcagaagctcttcctcaacctctttctctctctgagaaagttcctcaatacgagttccggatgcagcaacctgttttttaacctcttctgcctcttctctttttccctggcccataagagcaccgatctgtttggagatcttgtttctctcagcacggagagcctcaacctcctgcttaatctctctgttttctttatcaagttcgagaaccttgtcaaccagctccagtttgctgtcctggaacttattgcggatattctgctttacaacctccggattctctctcacaaacttaatgtctaacatgatattcctcctgtattaaaaatattcttactctttgcagttttttattccttctcaatctcaccaaggccaaagtttactgcttttctcaaagcttccacttcttcctgactaagtacaacataggactcaccttttacgatctcctttaaataaaggaaacagttatcgcggctgtgaaccgcattcaagatcagacccgtattgtttttatcaagaagcgccagtgcaaagctgagttttccacctacatcatcaaatgcatcatacttttcaacgccatatttgctgaacattacattcatattttttttgataaagctgatgtcatgatcatgatcttcctttgcttcatacagccgatcgatctgtgcaaattttcttacaaaaactttttccagtgactgtgcgtctccgcctctcataaacatcttgtacttccgttccaaacggctgagacgcatattgctactcaccacattgatcagaagaatgatggtaaggatcagcaaaacaatgatcacaatcccggaatcaattcccatgctttcaaaaatcccgctcattctgcctcctatctgatagattcgaacagatcaatgatcctctccagttcatctctggaataatattcaatttcaattttacctttgttgtttttctttcgctgaatggatacctttgttcccatgatacctttcattttttcttccaggctctcataaatggcatcttctgctgtgtttttctctgtttttacttttttcgcaggagaaaccagattctttacaagtttttccgtctcacgaacactgagtttttcatcaaaaaccttcatggctgttgtttcctgaagagcttcatcagaaattcccagaagtgctctcgcatgaccagctgagatcatatctgcaattaccatttcctgaacttttgaagaaagcttcagaagacgcatggaattagttactgcagttctgcttttggcaactctgtctgcgatttcatcctgtttcaggtgaaactcttccatcagacgtttgtatgccatcgcttcctctataggattcaggtcttcccgctgaatgttctcgatcagggaaatttctacgatttcctggtctgtaaactcttttacaacaacaggaacttccttgagccctgccatcttggcagctctccagcggcgttcgcctgcaatgatctcaaaataatccttcttatcggataccaacaacggctgaagaacaccgtactgtttaatggattccgaaagttccagcagtgcatcctcatcaaaatgtcttctgggctgattcagatttggttctacgctggaaattttcacaagtcgttctgcggccggattatctttttcagttggtttgtctttttttacaactgcagatcttgtcttttttgcaggttcctttgacggaccgcctgctttgttcgggatcagtgcatcaagaccctttccaaggcctcctgttcttcttccagccatcactcgtcctccctgcctataacttcttctgccaggaggcgataactctctgctcctgtagatcgtgaatcgtacagattgatcggttttccatagcttggtgcctctgcaagtcgtacatttctcggtatgatcgttttgtatatattctggtccaggttttcttttacattttctacaacctgaagtgacagatttgttctggcatcatacatagtaaagaccacgccttcgatcttcagtctcttattcaatcggtctcttaccagttcgatggtatgtatcaactgtgacaaaccttccaatgcataatactcacactgaatcggcaccagaacggaggttgcggctgtcaaagcattaattgtaagcatgctcagtgacggcggacaatccatgattatgtaatcatatttccggcgaagtttatccgtgatctttttcaggataaattctttatcctcaagatcaaccagttcaatttctgcaccggaaagattcatattcgatggtatcaggtcaacattatctacaacgttctttataatggtatccttggtctctgcttctccaagcagcagctcataaagggtgttttctactgcattcttgtctgcaccaagtccactggtcgtatttccctgcggatcaatgtcgatggcaagaacctttttccctttttcagcaaggcaggccgatagattgatggctgtcgttgattttccaaccccgcctttctgattggcaactgcaatgattcgtcccattgtacccctcctttttatttttttaagggatttttactcattggatatcattataacacttttatttttaaactgccacataatgtttcacgtgaaacaatagaaaataggttttgaattattttatttattgtgtagtatacccaaactcattccggactaaacagaagtttgacagtaacaatacatcgattataaagtccatcaactccgcataaacttccagttttatttgttaccaatcagactatatattttatgccataaaaacgtaccagaaatgaagttcccatttatagatattttgctgaaattgttctgatttatcgtaatctcaaaaataattcgattttctcggtatagatatattatcttttatggaaccttgcacactgctacataggcatcgaaatccctttcttttacagcatttatagcattttcaaattttatctgaacactaaaaacattactattattatcaagcgaacaaaagtatctgtaaacgcattcgcagttctacactgaataactgcttcgcgatttaccaaaaggactacaaactactcttccctgataagaagcagttcttcaaccactgcttatcgtttcttgcaattgaagccaaaaacaggggggaactcctgattcgagtcatacaaacaaaagcatccgcagttgctacgcagctttacaccgaataactgctccgcagtttatcaaaacttgcttgtactcttcctgatacaagcaagtcaccaaccgctgcttattgcttcttacacttgaagcaggggacctcctgacgcgattaaaaactatatcacgctaccgtaaagcgcatatgagttgtcgttgttgcgaaacattttttaagtcaaacggataaaaacatcctcttcactactgctcatagcttaataaatgtttcgcagtttatcagaaggagactgtacttctcctgatacaagcaagtccccaaccactgcttattgtagttcacaattaaagcaggtgaattacttgattcgattaaaatctatattaaacctaccataaaacacataagcacgaactacagatgttttttatttctgcaattgtcaaagatggggttatgactctttattcttaatctgtcttcggatgtttcacgtgaaacatccgaagacagattatcaaaccaatattcataattgaagcaagtgacttcctcgatccggttaaaaatgccatcaacgaaatcgatccaggacacggtttgacttgtaactgcaagggtactgaacagttacgaacacattataaaatcaatgagaaatatcaaaaaaatactccgatatattctctctggcattatctgtatcacgaaagcatgtaaaaaatacaagaaactccatccacaaaataatgtggctgttatctttatattcctcaaaaacatctatatataataaatggaaacttcttttcccggagtgtttttatagtgtgaaatacatgtatctctcgtgaaaaaaatataatattatgaaactagaattttcgatttttgtttattttattatgtttacgaaagatttgcgtatttatttcatttttcttccaatcctgttatacattcgttatgtacatgttaactaaagactttttcaagcatagtttcattttgtaatatccaatataaaatgtatctgaataaggttccggcatagaactggcataaaataaatttcacttaataggcttttttcttctaaatcaagccgtaaaagacttccctgtcttccctttatcccagtcatgcggacaaaaatttttgcattcgatcacagttttacacaaaatagctgttttacagtttatcaggaagagtacaagtattttcccacccacagcttattgtttttttgtaatcgaagcagctgctttcttttattcgatcaatcaaaatttcacatgtttaaagtaggaacggatctatattttatctttttgccgtatgtgtgcaggtgcacattttatattttaaggctttttatatgtacatgcgtgtaaagtacgttttatcgtacttttttatttaaagtactataatttgtactttaatacttttttattcgtaaatatcctattatttctctttatttgccagtattttcttttataaagtcctttttatcgtacttaacgtttgtgttattatcattatcatagtgttctcttcgcagaaataatctctcatttctctttatttcatccttactcttatatcgttcttctataaaatcccccatattttccgccttcccctccattttttcatataaatacacatttttactacattcacttaacttgttaattccccatccagttcacaaaagcatctgaccgaaatcatggggaatactgatgacagtatctggcaactcaccttcaagtgtgcaaacatatctatccaatttgggatcaaacgaataaaaatacccgtattcgctacgcagttctacacccaatagctactttgcaatttatcaggacctgcttacaatgtacccataacagtggccacatgaattagtgcagtaccttgtttttagacatgcccactattcttttccctgcttctaaacgccgttgcattcttcctaatacacgccacccactgcttattacttattactttttcgtaattgaagcaggggacttactgttaactggtaatattatcctccgagtttttttgtgcgcaaagaccactgaaagccctggacataccatgcaaatttatgtgattagcataatttctgtgcatcgcgaagtgtattaccaagaacggagtgatcagtaatcaggaaacttcttgatttaaaattcaagcagataaaagcatccgcttcactacttgctcataaccgaataagtgcttcgcagtttatccgaaggagcctgcacttctcctgatgcaagcaagttcccctgattattgcttttcgaaatcgaaccaggggacttatttgattcagttaaaaacacttcttctcttgcctcattttcccctgaaatgctataatccataaagaaagcatccgcaaactccttgcagtttgcggctaatacattgtttcgtaaataactataccaatcgcgtgggatgtggattcgaatgtgcaggtataaaaatgcaggcgtagctggctatgctgaggcttttagatctgtgcagtcggattcaccaacaagtaattggtatagttatttcgaaaacaatgtactagtcatttatcatctgattgaaaggaatattttatacatgaacaccacaaataatcgcaacgatttctataaagaacaattagacaagactttaaatggcaatgaaaagatcgaaactgccattgcagcactccaaaaagaagcaaccgaagaaatgcttgctcatactctcaccgtaatccgtcacagaatgcaggagcaggcacagctgatcattgctgtagaacctccaaaaggtgatggaaaaatttctcttcatgcgatcaaaaccaacgatggaaagcaatggtgggctgcatttaccagctttgacgaagagttaaaaggcagtgataagatcatgtccacatttaccgcagatattgataagatttttgcttctgcattgcaagagccgtctgttgagggagtaattctcaatccatggaatcgcacactgatgctgaacaaaacccttatcaacatcatcctcggcaatcctgtatagcatcagctccgtcggataacaagtccagtccaatgtttcacgtgaaacacttggtattttactgaagtataaaagcattccagcgaataacagcatccgcttcgctacttgctcataaccaaataactgcttcgcagtttatcagaaggagtttttccttctcctgatacaagtaagtccccaccctctgcttattgctcttcgcaattaaagcaggggacttacttgattcggttccaaatctgatttctatgtatcatgaagcatattggctatgctactgttcactgataatattccgtaagtttttttataaacgaaggtcgcagaaagcccgaagccataccgcaccaatttatgcgatcaacataaattctttgcattgcgaagcgcgttactgaaagcagaacgaacagcaacttagcgatcatcgccaagaacagaatggacagtagcgtcagcatacaataacaaggttagggttcccacaaaagcattgtaaatttttcgttcctgtcgtataataaagcaaagaaatattcagaaaaaatcagatcagatacctgaattacgttacatctgtcctgattatttttacgaattccaggaggctttttaatgaagaaaaatggacacagactacttactcttgcagctttagtcggaactgccgcaggtgttattcatattgctaaccgtttcatagatgccacatctcagcttaaagatatgctggaacagccacacagtaaaacctatgactggcgttttggaaagattttttatacaaaacagggacatggcacccctattcttcttattcatgacatcatgccaggtgcttccggttatgaatggaatgccatagagaagcagctcgcaaccgaacataccgtttacaccattgatcttcttggatgtggacgttctgaaaaaccggatattacttataccaattttgtatttgctcagttactctgtgattttgccaagaatgtgattcgtgaggaaaccgatgttattgccagtggtttctcaggttcttttgcgatcatggcttaccgtaacaattccgaccatttccgcaagatcatgctggtcaatccaccaagcttcagttccctgaagcaggcaccttgtaaagacaacaagctctttaagtattttatcgagcttccgattttcggaactctgatctatcatatggtagcttcccgcgaatccatcagcagtctgtttatggaaaagctgttctacaatcccttccatgtaacagatacactggtagacacctattatgaatccgctcacaagggcggttccaacgccaaatatctgtattccagctacattggcaaatacctgaatatcaacattaataatgccgtagaatcttccgatgcatgcatctatattatttccggagaaaaagaagcttccgcttctcttatcgcagaggaatatcagaagctgaattcttccattgaaaccgctgtgatcccggaaaccagacatcttcctcatctggaagatccggaacatttcctggaacaggtagctattttcctgtaaaaacaacttatgatccggcatcaaaaacaaaatttatctatagtaattttggaaatcaacgcatcaaaagtacattgttcatattcggagccattgagctccatacagtaatttgtggaaatgctataaaccaacaaaaagccaataaaaaaagagtactgtttcacgtgaaacatgagttttccctcaaacaaacgtgaaacaatactctttattttttaccagactcacagcatgcatccggacatttctcttatctaagtgcctgctccagatacatgtgtgttgtattatcgatcagcttatgcgtcagctctgccatatgctgtgtactctcctgattctcagaagacagccatgtcttgatcattcccacgcatccgttcagacaaaacgcatacgcatactcaatatcacggttgtctttcggaagacgaattgacaagcgatgcagcactgtatctgcgatcagtttttctatacgattcacaaaagccatatctccattctttccaagaagtgcgatacaaatatccttattatgatccaggatcgtaaatatctgctcaataaaaggatacgagctctccttattattaagaggatccagaggatagtctgccaccagatgcgtgatttcctccatcaattcagcctctatggattccagcatctgatagatatctgtatagtgaagataaaatgtggagcggttgatatcaacttcttccaccagttcctttaccgtaatttccttaatactcttcttctgcataagacgggcaagccccgctcgcaactgtgccttggtcttacgtactcttctgtcaactttttccgccatcttaattccccctgcaattcaaaaaagcaagcacgtttcctccgcctcaatcacctattacttacgatactctgcaactgtcatacaatgcataatgcatccttcaaacgaataaaagcattcgctttctctacgccgatctgcatgataccagatatctgctgttgttaagaattgacaagatcaaaattgttaacgacgccgacctacacgataccagatatctgctgcatatttgtgttgaaacataggaatcctgtctgcatttaatattaccaactgcacataaattcaaaggaaataacgtactttttgtctattatgcagttttttatttgtaatagacacttccattatttccgtctattaatatacattcagtaaagatttaatggttgtatctgtggtatgtgtttagtataatacatcacgtaaagaaaatcaacactttgtttgataatggaatataaagctattaatagattttaatatgattaatagatctcgtcgccattactggaataaagtttgattaatcaactatgtttgataatacaatttaataagaaagggataggtaatatgatcaaaaacgaatggaaaagcttacttcgtaacaagctcatgcttatcgtcgtaatcgccattatcgtaatcccgatcatctatgcaggtctgtttctgaaatccatgtgggatccttacggaaacgtagacagcctgccagtggccgtggtaaacgaagacaaacctgtcgagtataatggcaagaccttaagcataggtaaggacatgacggatgagctgaaagacaacgactcaatggcatttaacattgtagacagcaagacagcagaggacggtctggccaatggaacctattacatggttatcaaaattccggaaaatttctccgcaaacgcagccactgtaatggacaacgagccaaagcaaatggagctatcctatgagacaaaccctggaaccaactatatcgcctccaagctcagtgaaacagcaatgctgaagcttcgtgataacattgcttccaaggttacggaaacctatacagaaaccgtttttgattctatctcagaagcaggtgacggaatgcaggaagctgcagacggatccggaaagatcgaagacggactgaatacagcagctgatggtaacaaaacaattaccaaaaaccttaagaagctttccaccagtactcttactttcgtaagcggtgctgacagtctcaccgaaggtcttaagacctacaccgatggtgttgcaaaggttaacgatggtgcaaagagcctggacgatggtgcagatcagctgaacagcggcgttgcaaccctcacagaaaaggttcctgagctgacaaccggtgtggatactctggataaaggtgttcagcagtacaccgctggtgtggatgagcttaataaaaattctgatgcactgaaatccggtgcaagcagcctggaatccggtgcaaaccagctgaacagcggcgttgcagctctgacagaaaaggttcctgagctgacaaccggtgtagatactctggatgaaggtgttcagcagtacaccgctggtgtggatgagcttaataaaaattctgatacgctgaaatccggcgcaagtagcctggaatccggtgcaaatgcattaagtgcaggtattgatactctttccgacggagcaacacagtatgtagctggtgctgacactcttgcagatggaactaccacctatgtggctggtgctggcaaactcgcagccggtgccaaagagcttgcaaaacttgaagacggactcacaacagtttccaatggtatctctcagctgaataccggtgttaccaaaggaaccgatgactcacagtcactgatatccggaacacagcagcttgaaaacggactgaaagccctgaacgataaggtttctgctctgaaagagggaacaacacaggaatccatcaacaagcttgcagccggccttacttccgcaaaggatggtatggacacagccgcagctggtatgaacagtgctgcagctggtatgaacaatgccgcagacggaatcaacaacgcagccggatatatcactcaggccgcaggcatcacaagtcagaccagcagcagtatcacagacagtctgatccctgctctccagaatgcaggcacacagttctcacaggtaggtgatcaggtcagcagcatccttacaggatacggacagcagacaacggaagcacttactgatgcaaataccaagatcggtactgccggacagacaatgaccgatttagcagcacagcttcaggcgattcaggcaaccgcttctgaggacggaaccatttccgcagcagctctgaatgatgtgatcaacgctttaaacagcgtagccggtggaatgactggcgtggacggttcttacatgagcagctattctgatcaggtttcacagcttgcagctggtgtatccggtcagctctcttctactcaggaaaatctgaatgctgttgcttccaagcttaacgaagcagcttccggactgactcagatctccggaggactgactcagggtgccggcacactttctgagggtgcaacaaccatgacagatggtgcaaaccagatgagtgcaggtgcaacaaccatgagcgtaggtgcagagcagttatctgcagctacaagtcagcttcctacaaatctgatcgctcagctttctgcaggtgttacccagctgtatcagggtgcacaggctgtaaacacaggaaccaagaacgtttccgcaggacttcagtctctggaagacggcacagtcgaagccttcccggctgcagcagcaggaatcaaagctctgaacgatggatttgaccaactgacatcttatgataagcagctcaacgacggtgcaaagaatctgaaaacagccggcaaacagatcactgacgcacttccggatatcaaatccggtgcaggtcagctggcagatggttctaaggcactgacagatggaatcacaacttacaccgatggtattgcaaagctttccgaaaacagtgctgctcttacagacggcaccaagaaactggcaacaggagccaatgctctttccagcggtgctgctactcttgcagatggaacaaaagcattagccgatggttccggaacactgacaaccggaatcacaacctacaccgatggtgttgctaagctttccgaaaacagctccgctcttacagacggtaccaaaaagctctcaacaggagccaagaccctttccagcggtgctactactcttgcaaacggaactaagacattagcaaacggtacctcaacacttctcagcggtaccgagaaacttgtaagcaacaacagcacacttaacaatggtgcaaaacagcttgcagatggcgctgcccagatccagagcggttcctctcagctgtatgatggctccaagaagcttggaagtggtatgaaagaactgaaagacggttccaagacactgaccacaagcctcagcgatggagctaccactgtaaaagacaattcagcaagtgatgaaacgatcaaaatgttcgcaactcctgttgtaagcgatgaaacaaaacttaccgatgtcccgaataacggacacgcaatggcaccttacatgatgtctgtaggcctctgggtcggcgcactggcattctgcctgatgtatcctctggctcagtataagggcaaactgaaatccggtttcgcatggtgggcaagcaaagcttccgtcctttatccggtagcgatccttcagggaatctgcctgatcctgctgttacgtgcatttaacggattcacacctgcagagatgggcaaaaccgtactcttcgcctgcctgacatcaatgacctttacctctatcatgtacttcttcaacattactcttggtaaagtaggaagcttcctgatgctggtattcatggtcgttcagcttgcaggatctgccggaacttatccggttgaggtttcaccttcattcgttgcaaagatccatgcatacgttccgtttacttatacggtcgacgcattccgtgcaacgatcagcggtggccgaagcattaccacttccattattgtaatggttgcactgttagtgatcttcacgatcctgacgatccttcagttcaatcacatgaccaagagaaagaaagcagaaaaagttgttctcttcgactggctggaagaaagaggtcttgcataatacttagttactgacagaagctcccccgaaccttctgttagatatagaaaaattaaaactgtacagttgctcagatgagcttctgtacagtttttttatattgtcctcgtcaattctccacgctataattatagcagttatagaaaatcaagctcgccagtacaccgtgcctgacctatgcagcagatttcagttcagaaacactcctgtcagattcagaagaagcggcaatatgacttctcagatctactcacaaaccggagctctttctgactgcaagcctgcggttttcaatgaaaaagcaacctggtatgcatctaatccactgaccgcaaaaacagccagaatcatcacctatgctacaccatttaccgtcttcagggtaaaacctggaaagctatcggcaatacaaaaaatacaacctacaccgataaaaagccatgcaccgcaaccaactaccgtatccgtgcataccgcatcacaaacggtaaaaaaatatacggaccttattcatctgtaaggaccgtaaaataatagcaacataaaaacaccccggaaaatcctgatctgtgtggtgtctccgaatatctgatcatcaagcggatattcggagatcaccttattgtttacggatctccgaggtgtttttatttattttcttaatattttatttttccgcctcagctgttggtgttgctgtggcttctgtctctgtttcaccgtttaccatggtttcatatgcattgaacatttcttttactgtcattttgtttacaagaaataccttgtccccaacgacagctgcataatagtttgtgtcatatgtgtagaaggtaacggttgtctggttcttgtcagagtctgtgaatacagcggtcatctccgggtctgcagccggtgtataagcgtctgtcagtctcttctgtcctgccatgtttatcagcttgttgtagaaggtggtaaaggttgtactttctatttccttaccatccagctgataggttgttgtttctttttcgtttccgtcatcatctgtggatgtttcacgtgaaacatttacagtacttgttgtttcaccgtaagtaacctggagctgatccagattttttacagacacataattgacgatcagtgaccagagatctgacggcgtcttgtcaataactgcactcagtgtatccgttgacattgtatagatctgtttgttatctaccgttacatatctgctgccatctcctgcctcatcgccaacgtaaatgacaagctgtttatccactgtggttgtcttgctgtctgcatcttctgagctgctatccgtgtcagcgctggcgccgctctcagaatcactctcagaggccgtagaatcgttttctccggattctgtactgtctgtgctgttattcttcaccttttcctgataatccactgtaatcgtcgcatagggcttatcaaggccatactgggaaagatcctctgcattgtagtttacaaactggtcaaatgcaaagtttccaagtccggaggttacatttcctgctgccgttgtatcggcagactctttatcgctgtttccgtcaccggaaacatcccaggtagctccgtcggaattttcttccaggacataggaatctttattctcactgacctggacctttttcactgtggaagaatcaattgtcgggaaatcttctccctgtgcataatcgtaaagggaattcataaacggagacactgtatctgctgccactacatataccgtgctgtcatcatcatccttggaaatgtaatactgattcgtagacgtattctcatctccgatgttgagcttcgttgtcccatcagcggtatcaacggttactgtgttagatggagaatccagtccgtattccgtaagatcctccacatcctccaggactctgtccgcttccacctttttgatggcggaagcggcggaatccagagttgtctgatttacaggaaaagcagtctcatcctttttcacccaggaatcatcttttttcacccaggaatcatcttttttctcaaaggtcacttccttcttgtctacgataaattccagggatttaatgtcatccgttttcacggaaaacacttctgttttgctttcctcttcgctgctctctgtcttttcttctttggatacgtaggtgttcagtcccacataaacgccgccgagaactgccagaacaacaactgctgaaacaagtttggtcgattttttcattatgcttttctcctcttaagccagatcaggaatcctgcaacaaggaatactcccgggatcagaccaatggtacaaatcttccagaaggctgcatcataatcggttactgtcaggcttgtggactcaaggctcttggatggaatagaaacggaattactgtcgtctgtgctggtcatccagtttaaggactctagaaggagcttttcatttccgccggataccatctggtttatctggctctccatcagatttgctgtggagtagtaaacgatctgtgtttccttatcatcatccagtttctcagtgatggcaacaccaagatcaaacggtccgtctacatctccgtcttccttttcgatattgctgctctgcatatttgttttagagtaagccttgtcagaggttgtcaggatactgtcgatggttacggtatctcttacatcatctgttttctgaatgccctgtgcatacggtgccagtacgtaggagcctgcagaagctgtctcagagcttgcatctgtgctgttgactgttggtacaagataatatggcatctgcattccataatgctgattatcaccctcaaatacgattccttcggcacactttacaccatagttttcaagaaccgcatcaaagttcggcagatcatcctgtgtataatccgagaagatcatagcttttccgcctgcctccagataatccaggagttctgttttttcttcctcggaaatatcgctggtcggagatacgatcatcaggcagtctgcatcatccggaacctttccctctgtgagaaggttcagctccttgatatcaatgtttgctttctggatatcttctttaaagctggaatccagatctttttctccgtgtccggataaggtgtacatgatcggaagatccttggatgttacataaccgatcgcacttgtgatctgtccttctccatcaaatccggtagtagtctgctgccaggtattatagtctactgaagaggaatacatatctttgtaattgataaccttgtttctgtcgccgcagactacgatcaggctgtttgacgcaagatcatcggttgtatattccgatgcaaatttcggatttacaacagggtctttcacctcaactttaatatgcttggactcatctttataacgtgaaagcagattggaaatcgtgtcgtcctcagaaccgcttgccgcgatctgataaatggtaacatccttatccagtgccttcagtatcttctttgtttcatcaccgatggtgtaaagcttggatgagcttacatccagctgtgaatatttggatgggatcgcaccgacgatcatattgatcacaaccacgatcacgataaagacagctgccatagccatgctgtaggaaccatttttgatatgttttttgctgatggtgcctaccagttttttcggatccggtttatgtttctttttgccggagtcctgtgcggtctccggtacggctgcctcgcctttatttttcttaaatttctcactgaatttcatttccattcaccccctagttccagcgtctcttctgaatggactgcatggtaaggaacaggcagatcgcaataacagaaataaaataaacgatacctgtcacgtcaaacacgccttttgtaaaattatcataatgtccgctcaggttaaatacgttcagtaccttctggataccaccctggaaaatactggattttacaacgtatacgatcacaagggcaatctctcccacagctccgatcactacagagatcaggacatttttgatcatggtataaatgatgatagcgatcgccacgatcagaagtccgaatgccactgcggttgacatggaggtctgtgaaaagaatgaagaaattccgttcatcatatagaaggcgaacaggaatacaaaagtaagtactgctgcaattacctggctttctgtaagtgctgacataaatacaccgatcgccagattcgcgcatcccagaaggaaaaatcccaggatcccggtgtatgcggaagcataggaaatcgttccgaacttactcatgatcagaggataaacgcacatgatcacgaccggaatggcaaacacagctaccagtgcaagatattttccaaatacgatatcccatacagataccggtgcggtcagaagaagctgatccgttttctgcttgcgctcttctgcaagtacacgcatggaaaggatcggcacaccgatcaggaacacaaaggtcagtgcgcttaaggtagtttcaaattttgaatagccgcctgaaagctgatatgcggaaaaataaattccggtcagcaccaggacaaaaaatatgaagagatatccaaccatggaggtcagatagcttttcagttctcttttaaaaatcgctgtcatgactgattcccctctttctcatcagaagccttctctggttccccgtttttttcttcctgagttttttcttcttccgatgatctgtcttctaccggtttccactgtgagctttccggttttccggcggattttttctctccttcggtaagctcaaggaatacatcctcaagggaaactctcttaacctgcatctcgtagatcggacagttcgcttttgccatagcgtagaagactttttcacggatatccacattttcctgaatggaaagttttgttttccacaatttctcatcgctgtcataggacatttccactccggttacgccttcgatcgtttccagagcttttcgaatcgtgtctttctcgccttttaccttcataaggaggctgttggagcctgctgccagacgttccagattatccggtgtatcgctggctaccagctttccatgggaaatgatcagaacataatcacacactgctcttacctcggaaaggatatgggagcttaagataaccgtgtgcttctgcttcaggcctttgatcaggtcacggatctcgatgatctgcttcgggtcaagtcctactgtcggctcatccaggatgatcacttccggatatcccaggatcgcctgtgcaaggcccaccctctggcgataacctttggaaaggtttttgatcagacggtctttcatgtctgtgatctttaccatatccatgacttcttttatctgcttgtctttttggtttcttgggatttttttcagatcagccgcaaatttcatgtactcaagaacagtcatgtcaaaatagagcggcggcatttccggcagatagccgatacatttcttggctgcctccggttcctccagaatatcatgaccatcaatcatcacttttccttctgtggaagcaatgtatcctgtgatcatgttcatagttgttgattttcctgcaccgttggggcccaggaatccgtaaattttccccttttcgatctgaaaggaaagatggtcaactgcagtatgatcgccatactttttgaccagattacttacttcgatcactttactctcctccttttattctcagggaaatactttttttaattatcgatttcccattttataagatgccagaggcaaaaggtcctgaaactgaagcccttgactctggcgtcttttcaacaccaatagaaaatgcccctggatgaaacagagaatgggggaatccaggggcatctctatcggattatagtgtaaaagtaatttgtgataaaagtaggataaatttgtgataattttgtgaaactcccggacaaaaaaatctcctgtcggacagattttgactttgttcgacaggaggtaacttatgccagtggctctctgagcggtgttccggcttttctcggatatttgcctggggtgttctttaccttctcgataatgaccagggagcggccgatctcagatcccggaaggtcaaagtactgaatatccctgatctttccaccaaggatctttactgctttctctgctgcttctgcttcttcctttacagaaccggatttataggagacaaaaagccctccgacttttacatacgggagacagtattcagacagggttgcaagtccggatactgctctggatacgcagagatcatatttttctctgtaggctttgttttttgcatattcttcagctcttccgtgaatggcggaaatcccctccaggcccaggagcgcaaaggtttcttccaggaattttactcttttattgagggagtccagaaggcaggcttccacctccgggaaggcaatcttcaggggaacacccgggaatccggcgccggttccgatgtccataacggtttttatcttacccatatctacagccttgacgcagcagaggctgtccaggaaatgtttcacgagaacctcgtcaaattctgtgataccggtgaggttcatgactttgtttttttctacaagatattcgtagaaccggataaactggtttttctgcgtgtcactgagtgtgatcccaagctcctcgcagcctttttccaggatttctaaattgtacatgcagcttcctctcttattttctgtgttttattgttattcgttgtattatccgtgtttatgtccggatctgctttccagatatacaagaagcacggaaatgtcagccggggatacaccggagatacgggacgcctggccgatggacaccggtctgtaggcttccagcttctggcgtgcctcaatgcggaggcttcctacatcttcgtaatcaatgtcttccggaagctttttctgctccagtttcttaaactgctctacctgcttcatctggcggcggatgtagccatcatatttgatgttgatctctacctgctcacatacatcttccggaagctccggtctttctttatcgatgggtgcaagcaccttatagttaagctccggccgacggatcaactctgcaatggtggttccggatttcagaagggtactgttcagagattccagaaggctctgtacctctgcagaaccacctacggttgcatgttccactctctcgatctcttcctggatccggcgctctttttcctgtaatttatggtatgtctcatcatcgatcaggccgacctcccagccttttttgcgaagacgaagatctgcgttgtcctggcggaggagcagacggtactcagcacggcttgtcatcattcggtacggctcatggttctcctttgttaccagatcatcgatgagaacgccaatatatgcctctgagcggtccaaaatcagctgttcccggccttttacctccatagctgcattaattcccgctatgaggccctgagcggctgcttcctcatatccggagcttccgttaaactgtccgccgctgaaaaggcccttgatctttttgaattccagtgtgggatagagctggcgcggattgatgcagtcatactcaatagcgtaagcattttttacaatcctggcgttctccagacccggtacggaatggtacatctcgtactgaacatcctccggcagggagctggacattccgccgatgtacatttcatttgtgtaaagaccttccggttcgataaatacctgatggcgttttttgtctgcaaaacggactactttatcctcaatggatggacagtaacgtggtccggttccttcgatcattccggaataaaggggggatctgtccagatttgcacggatgatctcgtgtgttttttcgtttgtataggtcagccagcaggatttctgctcgatctgtacagattccgggtctgtggaaaaagagaacggtacgactctttcatctccgaactgctcttccatcttagaataatcaatggtgtttccggcgattctggccggagttcctgttttgaagcggaacatttcgatccccagctttttcagggaatccgtaaggtaattggctgcctgaaggccgttcggtcctgtatagttgctgacatcgccgtaaatgcagcgggccttgaggtaggttcctgtacagaggactacagcttttgcgtggtaggtggctcctgagaaggtttttacaccggtgatgtgcccgtcttctaccagaagctcggtcacttcaccctggcggatggttaagttctctgtattttccagtgtctttctcatttctgtgctgtaggcctgtttatcggcctgtgcacgaagggaatggactgcagggcctttggactggttgagcattttggactggatgaaggttttgtctatgtttttacccatttccccaccgagagcgtccagctcacggacgagatgccctttggagctgccgcctacattggggttgcagggcataagggcgatgctgtctacgctgactgtgaacatgactgtgttgagccctaagcgggcgcatgccagtgatgcttcgcagcctgcgtggccggcgcctactactatgatgtcgaaaaactgttccagatttttcatgctttttctcctttattttttctcttattctttttctttatttttctttgtgattttctttttctttgtttattgtgtggttggtttttggttttatttttactttcttggcagagggcctggttttttttgctttgggaagctgtggaaaaccgcaaaggggccgtaaagccacggcccctctgcacacccctcgggctttttttaggagttcttgggttgtggtgtgtgatacggtgttgacttttgtctgtatgcttcggtattggatgtgaaacgttgtgccgagggggttgcagtggaactgtaatgaggttctcgatgtgcgatgcacgtctgcggaattctgcagtccatgtggcgtacagcagggggccgcagcctatgcggcatatacggccgaggttccacaacccatgcggcatatacagccggagttccgcaatctatgcggtatatacggcggggtctccgcaatctatattatgcaacaatatatcctacagaaatatacaaagttccgttagatatatttcggctcagtgttgaattgccgatacagaagcatacaggcataagttagtttctttcagctttccacaatcgctgcactatataaaaaaggcccaggggtgtgcagaggggcgcggccttgtgcccctttgcagttttctcacattccaatgtgatctaccctctgcgggtttccgcagtccatgtggcatacagcagggagccgcaatctatgcggttatacgaccggagttccgcaatccatgcggcatatacggccgggattccgcaatccatgcgggcattcggccggggcctccgcagcccatgcggttattatttccccatacaaaatttagaaaatatctcattaacaaggtcttccccaagtgattctcccagaatccgtcccagactttcgtatgcatctgtcaggtctatggaataaaaatcctccggcattccgctttctatgctattttctaccagagaaagactttcctgtgcttttaaaagctcctgtctgtggcgttcattggtgatgtagacttcatcattgaagtcaatctccccactgaagaacatttcccggattttttcttccaggtctgtgatcccggtttcttcttttgcggagattgggatcaccggctggtttattctgctctttaaatcctctatatctatagcagattcaagatctgtcttgctgtagaggacaattgtctttttctcttgcaaaatttttatgatttcttcgtcgttttcatctaatggtacggaggaatctacgacatagaggatcaggtctgcgtctgctgccatttctttggctttggatacgccgattttctctacgatgtcttctgtctggcggattccggctgtgtcagcgatctttaatgtgattccatgcaggttgatatactcttccagtacgtctctggtggttcctgcgatatcggtcacgatggctctgtcctctcccagaagcaggttcagcagagaagatttccctgcgttcggcttacccaggatcacggtccggataccttcctgtatgatctttccgtctccggctgtttttaacaggttctgtatcttttctttttcttctgctacgatctgttctaattcttccgaatatcctgtcagatcatagtgctctgggtcgtctaatgccgattcaatgtacgctatatggtacagtagtttttccctgatctgctgtacagtttttcggactgaaccttttaattgtcctacagaattctttaatgagtactcatttttggactgtatcacgtccataacggcctccgcctgtgaaagatcgatccttccattgaggaatgcacgcttggtaaattctcccggctcggcaataatggctccgtttttcaacacagtttccagtacctttttcatggctaaaacgccgccgtggcagtcgatttctatggtatcttctcctgtgtatgtccgtggtccgcgcatggccatgaccagcacttcgtctaccatttcttcgttatcataaatatatccataatggatggtgtggcttgggacgtttttcagagatttttttccacccttggaacggtatactccggatgcgatctcaaaagcctccgggccactgatcctgacgatcccgattcccgatgcgctcatggctgtggaaatcgcagcaatcgttgtctcttccatttttcactctcctttgtcaaacggataaaagcattcggataaaagcatccggttaaacgcaaaaatgttactccggaaaagctttttacacgcaaaaacacgtgttattcacgctttcacctagaataacatcttctgtcagtttccatatttataatgctagagcgtgtttgaaaaaggctttctgcaagatgtgcgtcacaatttgtgggagattttgtccggatgaaggcgccgtagcaggctacggcaactgaattcgggcaaaatataccgcaaagtggggcgtgcagattgcgggaatgatttttcaaatacgctctaatctctgcattccggatgtccgctgcagaaatatcttttgttatttgctcttcaatgattataaagaattgttgcggagattgcaatgataatttttaattttcagttccatacaaaaaagccgtacccacggagcttacgctccgggatacggcttatggctttaccggcggatcatcaattattgcgtttcagttttactactacatgtctgtaaggttcttctccctcactgactgtctctacatagcggttaccctgcagagatgcatggatgatccttctttcgtacggattcatcggttccagaactaccggttttctggttttctttaccttgaaggcgattcctcttgcaaggttctccagagtttccttacgacggcgtctgtagtcctcggtatcgagttttacacgaatgtaggtagactcgcctttgtttaccacaaggcttgtcagatactgaagagaatccagtgtctggcctctttttccgatgaggatacccatatcctcaccttcaaaatccacatccagagaaccgtctgcagtgttgtatttcgatgtgatctccacttctccaagatccatggagccgaatacgtcacgaagaaatacgactgctctctcctcaacctctctgattttctccggatcgctgaggatctctatcggtctgccctgcttcggtgctctctcacgtgtttccttcggctgacgctcctttggagctcttggctgtttctcacgtgcaggctttgctttgccctggaaatcccttgcaggtctttcctttggtgctgctgcctttgcaggtgcttcttcggatgccttctccacctgtacagcttctttcttcaccggcttcttctcctctgcaggagctgctttcggtgcagattctttctttacatccggagtaaaaggcttttctaatttcttctcttctttgatagcgtccagtttcacggactctaccagttcatcgatctcctgcatatcagaaactggctcgattctgcgaactttgatcacggcaggtttgctgccgattccgaagaatccggagctgccttcactgataacctgaatatcaagctggtcactggaagttccaagctcaagacacgcttttgtgatagcttcattctttgtttttgctgaaaactgaatgtaatcctccattacgaacccctccgttcctgattatttcttcttatttctctcatcaaagtctcttacgagatttgctttagctgtgatgctgcccggttttgcacttcttgccttctcataagcagtatcaaccttctgtgctctgtctgaagcaccattgtttccgctgttgcccttattgatcacaggtttattgatattcttggcggactgatgagcctgattggtgatcttctgcggcggaagtccttccttcgcacgcttcgcttcgatcttcttcatattctcattaaccagatcatcaatgttcatcttatcaagatgacgattgattgcaaactgctgggcacttcgaacgacagcactggcgatccagtagataccaagaccaaccgggaatgtgaaacagaagaatgcagacatcagaggcatgaccatgttcatggttttcatggagtttgccattgcgctggcctgatcatttccgtctgccggctgtgttgcagcctgtggcataagcttcaggttcagcatctgagttgcccatgcaagaaccgggatcagaagtgctacgatcgcaagtaacagagaaccatgatttttgaagaattccatgatatagtacagcggctggtctgcgatattcagtccacagaagccctgcatcttggaaatattgccggatgcttttgtgatcgcatcagaaaatcctgaaaactgattcatctgtgccagctctttccactgggaaggagaaagtgcatacagaaaatcaacaatcgagttacttgtagcatttccggcactgtccataacgagacgcactcgtgtcatggaatggtctgtgataaactgctgcaggatatctgtgtatccgtttacagctagcaggttgtcaactacaccagtaaaaatgttctttacacttccaacgtaagcaggaatccggtagataacctgatacagagcaaacagaataggcatctgaatggctaactgtacacagctaccggttggagaaacaccatatttctgataaacagcctgggtttcttcgttcattttcatcatggaagcctgatcctttttaccctgatatttcttctggatcttctggatctcaggctgcatgatcgcgcttaacttggagaatttctgctgcttgatctgcagcggtgtcataaaggcaaagataagaatactgaagataatgatacaaagaccaatgttctggattccgaacaggccgtcaagcatcttatatatgccatccatgatccatcccatcacagacgcgatctgtccgataataggagttccggtttttgttgctaaaaacagttccaaattcatttcctcctagacttcttattcaattgtaaaagtccggtaactattctttcgtccactaactgcggaggtactgaacagttacaaattccgataactgctctgcccgggaaaaggctgaacagtcacaaaataattcatggcacagggtcatagcctccgtgggaaaaaggattgcatcgcaatatcctccatgccgcaagaagactgcccttaaatgcgccatatttttcgattgcttccaaaccatattgagaacatgtgggaatataaggacatttcgttctcttcatcggcgatatatatttttgatagagccttatcatcttaatcagaaatttctttatcatgttcattccctgttatatgatgctttcttgcaagatgcagaaaagcactctcgatctcgtgaaagctcttgcccttggctgcggctctcactactactacaatatcaaggttactgtcaaaatctgtttcgttgagacgatagctttctctgatcaatctggtgagtctgtggcgaaccacactgttccctacttttttgcttactgatattcccagacgattcttcatgtgctgattcttcagcacgtacatcaccagaagccgatttgcgtacgatgttccgttctgatatacaactttaaaatcttgatttttctttaaggactctgatctgatcaaacgaatcctccttaattagattccgcctgcgcggatatttctccggatagaagaaaagaccacataaatgcggtcttgcagcttatgctgataactgttttcttccttttaatcttcttgcagctaatactttacgtccgccctttgtgctcatgcgagctctgaagccgtgaactttagctctggatctcttttttggctgaaatgtcatcttcataggtaaagcacctcctttatctatttttaattgttatgaaataacttatcattcagaacatcgtttcaattatataaataaacctccttttcgtcaagtaaaaattgcaaaaaacccgataaaatcaagggttctgtaaaatacccccaccttacggtatttatttttttctcttatgtggaaagcgcttatggtttacgtaacattatccacattttgtggataacttgtggataacttgtggattgaccggaaatctatccactttttcggagggtttgttcacatcgttttcaaaaaaaccctttatttgcggtatttttaaggtggattttttatacacataattcttccacattttccaccaattctcgacttatggaaacctccaggactcttatccacaataatccaccctaatccacagtaatttccccacattatccacattcttttccccaaaatctcaaggattttccattgcgaaaaccccattttcattgtaatatataaaaggatatctatctccagtcgcagactggggttattataatactcatgggaggaaaaa
